(19) United States
(12) Patent Application Publication
(10) Pub. No.: US 2013/0237486 A1
(43) Pub. Date: Sep. 12, 2013

(54) COLLAGEN

(71) Applicant: Jordi Bella, Manchester (GB)

(72) Inventor: Jordi Bella, Manchester (GB)

(73) Assignee: The University of Manchester, Manchester (GB)

(21) Appl. No.: 13/884,832

(22) PCT Filed: Nov. 14, 2011
(86) PCT No.: PCT/GB2011/052217

§ 371 Date: May 10, 2013

(30) Foreign Application Priority Data
Nov. 12, 2010 (GB) 1019143.5

(51) Int. Cl. C07K 14/78

(52) U.S. Cl. CPC C07K 14/78
USPC 514/17.2; 530/356; 536/23.4; 435/320.1; 435/419; 435/69.7; 435/348; 435/358; 435/365; 435/254.2; 435/252.3; 435/252.33; 435/252.31

(57) ABSTRACT

The present invention relates to a trimeric fusion protein comprising three polypeptide chains, wherein each polypeptide chain comprises a eukaryotic collagen or collagen-like domain and a prokaryotic or viral trimerisation domain (PVTD). Also provided is a fusion polypeptide comprising a eukaryotic collagen or collagen-like domain and a PVTD. A suitable PVTD of a fusion polypeptide or protein of the invention is preferably derived from a collagen-like protein sequence found in the genome of the E. coli strain O157:H7 and other E. coli strains, and in bacteriophages or prophages infecting these strains or embedded in their genomes. A PVTD mediates trimerisation of collagen or collagen like polypeptides.

[0001] The present invention relates to a trimeric fusion protein comprising three polypeptide chains, wherein each polypeptide chain comprises a eukaryotic collagen or collagen-like domain and a prokaryotic or viral trimerisation domain (PVTD). Also provided is a fusion polypeptide comprising a eukaryotic collagen or collagen-like domain and a PVTD. In addition, the present invention relates to a nucleic acid sequence encoding a fusion protein or polypeptide of the invention, an expression vector comprising a nucleic acid sequence of the invention, and a host cell comprising any one or more of a fusion protein, polypeptide, nucleic acid sequence or an expression vector of the invention. In addition, there are provided methods for the production of a fusion protein and/or polypeptide of the invention. Also provided is a product comprising any one or more of a fusion protein, polypeptide, nucleic acid sequence, expression vector or host cell of the invention, and uses any one or more of a fusion protein, polypeptide, nucleic acid sequence, expression vector or host cell in the manufacture of a product of the invention. Also provided are methods of treatment using any one or more of a fusion protein, polypeptide, nucleic acid sequence, expression vector, host cell or product of the invention.

### BACKGROUND

[0002] Collagens are structural proteins essential for building the macromolecular structures present in connective tissues such as bone, skin, cartilage, or blood vessel walls. Type 1 collagen, the most abundant form of collagen, is often used for treating skin injuries and is a commonly used bone restoration material. Many collagens contain cell-adhesion sites along their sequence. The interaction between these sites and cell-surface receptors has effects on cell proliferation and behaviour that can be exploited in tissue regeneration efforts. Collagen structures can also induce mineral deposition. There are mineral interaction sites on the surface of these structures, which can effectively induce and control the process of mineralization, promote bone formation, and induce bone formation in implants.

[0003] Collagens are the major structural macromolecules present in the extracellular matrix of metazoa, comprising approximately 20% of total protein mass. There are many different collagen types. In vertebrates, the count to date is fast approaching the thirties (Kadler et al., (2007) J. Cell Sci. 120:1955-1958) whereas worms can have hundreds of different collagen genes (Johnstone (2000) Trends Genet. 16: 21-27). Type I collagen, the main component of skin and bone, is the most abundant protein in humans and vertebrates comprising approximately 80-90% of an animals total collagen. Other collagen types are less abundant than type I collagen, and exhibit different distribution patterns. All collagens form trimeric associations; these trimers can form from three identical polypeptide chains coded by the same gene (homotrimers), or from different polypeptide chains coded by two or three different genes (heterotrimers). For example, type I collagen is a heterotrimeric molecule comprising two α1(I) chains and one α2(I) chain. Lack of agreed naming conventions mean that some collagen genes are labeled as belonging to different collagen types depending on the sources (for example the α5(VI) gene sequence is alternatively known as α1(XXIX), that is a different collagen type altogether). Different collagen types are expressed in different tissues.

[0004] Collagen types participate in some form of supramacromolecular assembly. The most abundant fibrillar collagens (types I, II, III) assemble into microfibrils, fibrils and fibres to provide the unique tensile properties of tendons, cartilage, skin, bone, and blood vessels. Type IV collagen forms networks that are responsible for the correct assembly of basement membranes, with important roles in molecular filtration (for example in kidney glomerulus).

[0005] Type VI collagen assembles to forms beaded-microfibrils, which provide structural links with cells in most tissues. Other less abundant collagen types can be associated to the structures built from the major types, where they act as regulatory elements, can appear as transmembrane molecules with cell-adhesive properties, can build anchoring fibrils, or can form networks in other membranous structures. A large and diverse group of “collagen-like” proteins contain collagen triple helical domains but are not universally classified as “collagens”. These include acetyl cholinesterase, macrophage scavenger receptor, surfactant pulmonary proteins, or C1q. The last three examples share a role in innate immune defence.

[0006] Collagen types I, II and III belong to a group of fibrillar collagens, characterised by the formation of 67-nm periodic fibrils that provide tensile strength to animal tissues. Type II collagen is a homotrimeric collagen comprising three identical α1(II) chains, and is the predominant collagen in cartilage and vitreous humour. Type III collagen is found in skin and vascular tissues and is also a homotrimeric collagen, comprising three identical α1(III) chains. Type IV collagen forms networks instead of fibrils and is found in basement membranes. There are several type IV collagen isoforms, the most common being a heterotrimer made of two α1(IV) chains and one α2(IV) chain. Type V collagen exists in both homotrimeric and heterotrimeric forms and is a minor fibrillar collagen found in tissues containing type I collagen. Type VI collagen has a small central triple helical region and two large non-collagenous domains. It is a heterotrimer comprising α1(VI), α2(VI), and α3(VI) chains and is found in many connective tissues forming beaded-filaments. Type VII collagen is a fibrillar collagen found in specialised epithelial tissues, and is a homotrimeric molecule of three α1(VII) chains. Type VIII collagen can be found in Descemet's membrane in the cornea and is a heterotrimer comprising two α1(VIII) chains and one α2(VIII) chain. Type IX collagen is a fibril-associated collagen found in cartilage and vitreous humor, and is a heterotrimeric molecule comprising α1(IX), α2(IX), and α3(IX) chains. Type IX collagen is the prototype of a group of collagens called FACIT (Fibril Associated Collagens with Interrupted Triple Helices), which contain several triple helical domains separated by non-triple helical domains.

[0007] Type X collagen is a homotrimeric compound of α1(X) chains and has been found in growth plates. Type XI collagen can be found in cartilaginous tissues associated with type II and type IX collagens, and in other locations in the body. Type XI collagen is a heterotrimeric molecule comprising α1(XI), α2(XI), and α3(XI) chains. Type XII collagen is a FACIT collagen found primarily in association with type I collagen. Type XII collagen is a homotrimeric molecule comprising three α1(XII) chains. Type XIII collagen is a homotrimeric non-fibrillar collagen found, for example, in skin, intestine, bone, cartilage, and striated muscle. Type XIV is a FACIT collagen characterized as a homotrimeric molecule comprising α1(XIV) chains. Type XV collagen is homologous in structure to type XVIII collagen. Type XVI collagen is a fibril-associated collagen found, for example, in skin, lung fibroblast, and keratinocytes. Type XVII collagen is a hemidesmosal transmembrane collagen, also known as the bullous pemphigoid antigen. Type XVIII collagen is similar in structure to type XV collagen and can be isolated from the liver. Type XIX collagen is believed to be another member of the FACIT collagen family, and has been found in mRNA isolated from rhabdomyosarcoma cells. Type XX collagen is a newly found member of the FACIT collagenous family, and has been identified in chick cornea.

[0008] The three dimensional structure of collagen has taken many years to elucidate, and its study has been facilitated by the use of synthetic collagen-related peptides (Brodsky & Persikov (2005) Adv. Protein Chem. 70:301-339; Okuyama (2008) Connect. Tissue Res. 49:299-310) for example in crystallographic analyses (Okuyama et al (1981) J. Mol. Biol. 152:427-443; Bella et al. (1994), Science 266:75-81; Kramer et al. (1999), Nat. Struct. Biol. 6:454-457; Kramer et al J. Mol. Biol. 301: 1191-1205; Bella et al. (2006), J. Mol. Biol. 362:298-311; Bella (2010), J. Struct. Biol., 170: 377-391). The use of synthetic collagen model peptides containing specific recognition motifs has allowed the investigation of receptor-binding properties of different collagen types (Farndale et al. (2008), Biochem. Soc. Trans. 36:241-250).

[0009] Collagen proteins are now known to include a triple helical domain where three polypeptide strands are wound around each other. The three polypeptide strands, known as alpha chains, each adopt a left-handed helical conformation.

[0010] This triple helical arrangement is the main structural feature of all collagen proteins and is known as the collagen triple helix (Brodsky supra). The defining characteristic of this structure is the supercoiling of the three polypeptide strands, each of which adopts a polyproline II left-handed helical conformation. These three left-handed helices are twisted together with one residue vertical staggering to form a right-handed superhelix. A continuous ladder of intermolecular backbone hydrogen bonds stabilise the triple helical structure. Collagen triple helices can span very long lengths: the collagen triple helix of type I collagen is typically over 300 nm in length and in excess of 1000 amino acids.

[0011] The main form of human collagen in the body (type I collagen) is formed from three polypeptide chains, which are first synthesized as preprocollagen. Each preprocollagen chain contains, in addition to the sequence of the mature collagen protein, one N-terminal propeptide and one C-terminal propeptide (known as registration peptides), and a signal peptide. During post-translational modification of the preprocollagen, the signal peptide is cleaved off in the endoplasmic reticulum, to provide procollagen chains. Within the rough endoplasmic reticulum, the procollagen chains combine to form a procollagen triple helix, still carrying the propeptides (registration peptides). The procollagen triple helix is then transported to the Golgi apparatus, where it is prepared for export from the cell. Once outside the cell, registration peptides are cleaved and procollagen peptidase converts the procollagen triple helix to the mature form, tropocollagen, containing a collagen triple helical domain and two remaining telopeptides flanking each side of the triple helical domain (see Kadler et al. (1996), Biochem. J. 316:1-11, for a review of fibrillar collagen synthesis and fibril formation). Tropocollagen molecules then aggregate to form fibrils, which in turn form collagen fibres. The collagen may be attached to the cell surface by binding molecules such as integrin and fibronectin. Other collagen types have similarly complex biosynthesis pathways.

[0012] In type I collagen, and possibly in all fibrillar collagens, triple helices conform into higher order structures known as microfibrils. Each microfibril associates with neighbouring microfibrils to produce a stable, crystalline, structure (Orgel et al. (2006) Proc. Natl. Acad. Sci. USA 103:9001-9005). The fibrils resulting from the assembly of such collagen triple helices exceed 1 μm in length.

[0013] A distinct feature of triple helical domains is the characteristic Gly-X-Y repeating sequence in each of the three polypeptide chains of the triple helix. The X position is often occupied by proline residues (Pro) and the Y position is often occupied by 4-hydroxyproline residues (Hyp), which are the result of post-transcriptional modification of prolines in the Y position of Gly-X-Y repeating sequences (Myllyharju (2003), Matrix Biol. 22:15-24). Thus, proline or hydroxylproline make up about a sixth of the amino acid residues in the most abundant collagen types. Due to its role in determination of cell type, cell adhesion, tissue regulation and infrastructure, collagen is not a simple structural protein which would typically lack chemically reactive side chains. In fact, many of the non-proline rich regions of collagen are cell or matrix associated and have regulatory roles. This has the result that mutations which affect the formation of collagen can have serious pathological effects, in humans, at least.

[0014] Collagen was initially thought to be exclusive to vertebrates, but has also been found in lower invertebrates such as sponges, mussels, and worms. More recently, sequencing of bacterial and viral genomes has revealed an unexpected number of sequences containing the landmark Gly-X-Y sequence (Rasmussen et al. (2003) J. Biol. Chem. 278:32313-32316). In a few cases it has been demonstrated that the bacterial regions with Gly-X-Y sequences adopt the triple helical conformation and correspond to triple helical domains (Xu et al. (2002) J. Biol. Chem. 277:27312-27318).

[0015] US Patent Application No. US2004/0214282 provides recombinant triple helical proteins comprising bacterial and mammalian collagen. Methods for the production of recombinant prokaryotic collagen-like proteins based on collagen-like sequences from Streptococcus pyogenes are provided by U.S. Pat. No. 7,544,780 and US Patent Application No. US2009/0258390.

[0016] Collagen is widely used in the cosmetic and pharmacological industries, for example as a stabiliser, in pill coatings and capsules, and in dietary supplements. In addition, denatured collagen (known as gelatine) is widely used in foodstuffs, such as desserts. Collagen for industrial uses is typically obtained from animal sources, mainly bovine and swine or more recently from cadavers, placentas or foetuses. However, these animal-derived collagen products can often be contaminated by viruses and prions, and can induce autoimmune diseases when tested in animal models. In view of fears regarding prion related disease, in Europe and the US in particular, collagen must be free from potential prion and viral contamination.

[0017] Several strategies have been employed in order to induce triple-helical structure formation in isolated collagen sequences (U.S. Pat. No. 6,096,863). Triple-helix structure formation in isolated collagen sequences may be induced by adding a number of Gly-Pro-Hyp repeats to both ends of a collagenous sequence. However, even with more than 50% of the peptide sequence consisting of Gly-Pro-Hyp repeats, the resulting triple-helices may not have sufficient thermal stability to survive at physiological conditions. Although substantial stabilization of the triple-helical structure may be achieved with the introduction of covalent links between the C-terminal regions of the three peptide chains, the large size (90-125 amino acid residues) of the resulting “branched” triple-helical peptide compounds make them difficult to synthesize and purify.

[0018] For these reasons, it would be advantageous to find an alternative to animal-derived collagen, which can be produced easily and in large quantities.

### BRIEF SUMMARY OF THE DISCLOSURE

[0019] Thus, in a first aspect of the present invention, there is provided a trimeric fusion protein comprising three polypeptide chains, wherein each polypeptide chain comprises a eukaryotic collagen or collagen-like domain and a prokaryotic or viral trimerisation domain (PVTD).

[0020] Preferably, fusion proteins of the invention have a trimeric structure, created by association of the three polypeptide chains. Preferably, the structure is a collagen or collagen-like structure, where the polypeptide chains are coiled together along their length. Optionally, a part of the fusion protein (for example one or more PVTDs) may comprise an alpha-helical coiled coil structure. Each polypeptide “chain” of the triple helix of the fusion protein may be comprised of two or more polypeptides.

[0021] Two or more of the three polypeptide chains may be the same as each other or may be different. Thus, the fusion protein may be a homotrimer or a heterotrimer. Preferably, the three polypeptide chains of the fusion protein are wound together, at least in part, to form a triple-helical structure. Preferably, trimerisation of the three polypeptide chains is mediated by one or more PVTDs.

[0022] Preferably, a fusion protein of the invention will have one or more of the following, independently selected, properties:
[0023] a) a melting temperature of between 34° C. and 60° C., preferably between 34° C. and 59° C., more preferably between 34° C. and 58° C., 57° C., 56° C., 55° C., 54° C., 53° C., 52° C., 51° C., 50° C., 49° C., 48° C., 47° C., 46° C., or 45° C., more preferably between 38° C. and 44° C., more preferably between 39° C. and 43° C., more preferably at least 40° C., 41° C. or 42° C.;
[0024] b) solubility of at least 25, at least 30, at least 31, at least 32, at least 33, at least 34, at least 35, at least 36, at least 37, at least 38, at least 39, or at least 40 mg/ml;
[0025] c) is comprised of one or more fusion polypeptides which are substantially resistant to proteolytic degradation by host enzymes when expressed in prokaryotic cells.

[0026] In addition, the fusion proteins of the invention may exhibit improved ability to refold (thermal reversibility) after denaturation into a collagen or collagen-like structure.

[0027] Herein, the melting temperature is defined as the temperature at which one or more of the PVTD's of the fusion protein denature (or dissociate) to form dimers or monomers. This is also known as a helix to coil transition. It may be the temperature at which any one of the PVTD's loses thermal stability and undergoes denaturation, or it may be the temperature at which all of the PVTD's in the fusion protein have substantially lost thermal stability (and undergone denaturation such that the trimeric structure is lost and replaced by separate monomers and/or dimers). Preferably, it is the latter, such that the fusion protein as a whole dissociates into separate monomers or dimers. Denaturation at the melting temperature may be complete or incomplete. Preferably it is the latter, so that the dimers or monomers (fusion polypeptides) become separate entities. Where more than one PVTD of different types are present in a fusion protein, these may have the same or different melting temperatures. The melting temperature of a PVTD of the fusion protein may be the same as, or may be different to, the melting temperature of the eukaryotic collagen of the fusion protein. Whilst the melting temperature of a eukaryotic collagen or collagen-like protein of the fusion protein may be higher than that of a PVTD, typically it will be lower, typically at least lower than that of the most thermally stable PVTD of the fusion protein. The melting temperature may be determined by any known method in the art. Suitable conditions under which the melting temperature may be determined, for example, are measuring the CD signal at 220 nm or 222 nm while varying the temperature. Alternatively, viscosity can be measured while varying the temperature. Preferably, fusion protein samples are provided in physiological conditions, for example approximately 10 nM Tris-HCL at pH 7.5, 150 mM NaCl. The temperature may be increased in any suitable increment, for example 20° C./hour.

[0028] The solubility of the fusion protein is defined as the extent to which the fusion protein dissolves in liquid, preferably water. The solubility is measured by any suitable means. For example, sample of fusion protein may be added dropwise to a liquid such as water until complete dissolution is observed. The concentration of fusion protein dissolved in the liquid indicates the solubility.

[0029] In a prokaryotic host cell typically, a fusion polypeptide will be degraded before it can assemble into a trimeric fusion protein. This is due to the absence in a prokaryotic host cell of an endoplasmic reticulum which protects unfolded proteins from degradation. Thus, it is difficult to obtain commercially useful yields of fusion protein in prokaryotic host cells. The fusion proteins of the present invention have the advantage that one or more of the PVTD's present reduce or prevent degradation of a fusion polypeptide by the host cell, thus allowing formation of a fusion protein within the host cell. By substantially preventing degradation is meant that at least 20%, 30%, 40%, 45%, 50%, 55%, 60%, 65%, 70%, 75%, 80%, 85%, 90% or at least 95% more fusion polypeptide is able to form a collagen or collagen-like fusion protein in a prokaryotic host cell than would be observed without one or more of the PVTD's present. The ability to avoid degradation by native host enzymes means that the fusion protein is capable of being expressed in the cell, and surviving in order to form a triple helical structure and preferably being harvested therefrom. Preferably, the fusion proteins of the invention comprise one or more PVTD which functions as a capping domain. Typical enzymes which degrade fusion polypeptides within a host cell include proteases, such as serine proteases, such as trypsin or chymotrypsin. Other enzymes will be known to persons skilled in the art.

[0030] In a second aspect of the invention, there is provided a fusion polypeptide comprising a eukaryotic collagen or collagen-like domain and a PVTD.

[0031] Preferably, the fusion protein and fusion polypeptide of the invention do not comprise prokaryotic or viral collagen domains. Thus, the collagen or collagen-like domain of a fusion protein or fusion polypeptide is preferably entirely eukaryotic.

[0032] In a third aspect of the invention, there is provided a nucleic acid sequence encoding a trimeric fusion protein comprising three polypeptide chains, wherein each polypeptide chain comprises a eukaryotic collagen or collagen-like domain and a PVTD. The fusion protein encoded by the nucleic acid is preferably as defined herein, preferably in accordance with the first aspect. Where the nucleic acid sequence encodes a fusion protein of the invention, the sequence encoding each polypeptide chain may be the same or different, such that the fusion protein is either a homotrimer or a heterotrimer. Also provided is a nucleic acid sequence encoding a fusion polypeptide comprising a eukaryotic collagen or collagen-like domain and a PVTD. Preferably, the fusion polypeptide is as disclosed herein preferably in accordance with the second aspect.

[0033] In a fourth aspect of the invention, there is provided a vector comprising a nucleic acid sequence encoding a trimeric fusion protein comprising three polypeptide chains, wherein each polypeptide chain comprises a eukaryotic collagen or collagen-like domain and a PVTD. The nucleic acid sequence is preferably as defined herein, preferably in accordance with the third aspect. Where the nucleic acid sequence encodes a fusion protein of the invention, the sequence encoding each polypeptide chain may be the same or different, such that the fusion protein is either a homotrimer or a heterotrimer. Also provided is an expression vector comprising a nucleic acid sequence encoding a fusion polypeptide comprising a eukaryotic collagen or collagen-like domain and a PVTD. Preferably, the nucleic acid sequence encoding the fusion protein or polypeptide is as described herein, preferably in accordance with the third aspect.

[0034] In a fifth aspect of the invention, there is provided a host cell comprising any one or more of a fusion protein, fusion polypeptide, nucleic acid sequence or vector of the invention, as described herein. The host cell may be of any cell type. It may be prokaryotic or eukaryotic. It may preferably be a bacteria, yeast, insect, mammalian or plant. Where bacterial, it is preferably gram negative, preferably E. coli, more preferably O157:H7.

[0035] In a sixth aspect of the invention, there is provided a method of producing a trimeric fusion protein comprising three polypeptide chains, wherein each polypeptide chain comprises a eukaryotic collagen or collagen-like domain and a PVTD, the method comprising:

i) introducing into a host cell one or more nucleic acid sequences encoding a fusion protein or fusion polypeptide of the invention;
ii) culturing the host cell under conditions suitable for expression of said fusion protein or fusion polypeptide and optionally formation of a trimeric fusion protein comprising three polypeptide chains;
iii) optionally isolating the expressed fusion protein or fusion polypeptide from the host cell.

[0036] Preferably, the fusion protein, fusion polypeptide, nucleic acid sequence and/or host cell used in the method is as herein.

[0037] Also provided is a method of producing a fusion polypeptide comprising a eukaryotic collagen or collagen-like domain and a PVTD, the method comprising:

i) introducing into a host cell a nucleic acid sequence encoding said fusion polypeptide of the invention;
ii) culturing the host cell under conditions suitable for expression of said fusion polypeptide;
iii) optionally isolating the expressed fusion polypeptide from the host cell.

[0038] Preferably, the fusion polypeptide, nucleic acid sequence, vector and host cell used in the method is as defined herein.

[0039] As an alternative method, the sixth aspect of the invention also provides a method of producing a fusion protein comprising three polypeptide chains, wherein each polypeptide chain comprises a eukaryotic collagen or collagen-like domain and a PVTD in a cell free system, the method comprising:

i) introducing into a cell-free expression system one or more nucleic acid sequences encoding said fusion protein or fusion polypeptide;
ii) maintaining the cell-free expression system under conditions suitable for expression of said fusion protein or fusion polypeptide and formation of a trimeric fusion protein comprising three of said polypeptide chains; and
iii) optionally isolating the expressed fusion protein or fusion polypeptide from the expression system.

[0040] Preferably, the fusion protein, fusion polypeptide, nucleic acid sequence, vector and/or host cell used in the method are as described herein.

[0041] Also provided is a method of producing a fusion polypeptide comprising a eukaryotic collagen or collagen-like domain and a PVTD, the method comprising:

i) introducing into a cell-free expression system a nucleic acid sequence encoding a fusion polypeptide of the invention;
ii) maintaining the cell-free expression system under conditions suitable for expression of said fusion polypeptide;
iii) optionally isolating the expressed fusion polypeptide from the host cell.

[0042] Preferably, the fusion polypeptide, nucleic acid sequence, vector and/or host cell are as described herein.

[0043] Preferably, the methods of the sixth aspect further comprise purifying the fusion protein or fusion polypeptide.

[0044] The present invention also provides any suitable method for making the fusion protein or fusion polypeptide of the invention, which may be available to a person skilled in the art. Such methods may include, for example, chemical synthesis of a fusion protein of the invention.

[0045] In a seventh aspect of the invention, there is provided a method of producing a gelatine-like protein, comprising:

i) introducing into a host cell one or more nucleic acid sequences encoding a fusion protein of the invention;
ii) culturing the host cell under conditions suitable for expression and formation of a trimeric fusion protein; and
iii) optionally isolating the expressed fusion protein from the host cell; and
iv) fully or partially denaturing and/or fragmenting a trimeric fusion protein of iii) to produce a gelatine-like protein.

[0046] Again, preferably the fusion protein, fusion polypeptide, nucleic acid sequence, vector and/or host cell are as described herein.

[0047] As an alternative method, the seventh aspect of the invention also provides a method of producing a gelatine-like protein, in a cell free system, the method comprising:

i) introducing into a cell-free expression system one or more nucleic acid sequences encoding a fusion protein of the invention;
ii) maintaining the cell-free expression system under conditions suitable for expression and formation of a trimeric fusion protein; and
iii) optionally isolating the expressed fusion protein from the expression system; and
iv) fully or partially denaturing and/or fragmenting a trimeric fusion protein of iii) to produce a gelatine-like protein. Alternatively, the method may comprise, after step iii), providing conditions for the formation of a trimeric fusion protein.

[0048] Again, preferably the fusion protein, fusion polypeptide, nucleic acid sequence, vector and/or host cell are as described herein.

[0049] In an alternative method, the seventh aspect of the invention provides a method of producing a gelatin-like protein, comprising:

i) introducing into a host cell one or more nucleic acid sequences encoding a fusion polypeptide;
ii) culturing the host cell under conditions suitable for expression of the fusion polypeptide; and
iii) optionally isolating the expressed fusion polypeptide from the host cell.

[0050] Preferably, the fusion protein, fusion polypeptide, nucleic acid sequence, vector and/or host cell are as defined herein.

[0051] Also provided is a method of producing a gelatin-like protein, in a cell-free system, the method comprising:

i) introducing into a cell-free expression system one or more nucleic acid sequences encoding said fusion polypeptide;
ii) maintaining a cell-free expression system under conditions suitable for expression of the fusion polypeptide; and
iii) optionally isolating the fusion polypeptide from the expression system to produce a gelatin-like protein.

[0052] Preferably, the fusion polypeptide, nucleic acid sequence are as defined herein, preferably that of the third aspect. The nucleic acid sequence may be provided in a host cell as an expression vector, preferably of the fourth aspect.

[0053] Preferably, the methods of the seventh aspect further comprise purifying the gelatine-like protein.

[0054] In an eighth aspect of the invention, there is provided a product comprising any one or more of a fusion protein, polypeptide, nucleic acid sequence, expression vector, gelatin-like protein or host cell of the invention. Such a product may be independently selected from the group consisting of a foodstuff, cosmetic, stabilizer, capsules, biomaterial, medical device, medicament, artificial tissue, pharmaceutical or nutritional supplement, chemical or biochemical reagent, or glue.

[0055] Also provided is a gelatin-like protein of the invention, which preferably comprises fusion polypeptides of the invention, partially or fully denatured fusion proteins of the invention, and/or fragments of fusion polypeptides or fusion proteins of the invention. Some of the fusions protein or fragments thereof may be trimeric or in a triple helical structure. Preferably, substantially all is denatured, or if trimeric, has substantially lost the triple helical formation.

[0056] Also provided is any one or more of a fusion protein, polypeptide, nucleic acid sequence, expression vector, gelatin-like protein, or host cell or product of the invention for use in the treatment or prevention of a collagen-related disorder.

[0057] Also provided is a method of treatment or prevention of a collagen-related disorder, comprising administrating to a subject any one or more of a fusion protein, nucleic acid sequence, expression vector, gelatine-like protein, host cell or product of the invention. The treatment may be cosmetic, to improve the appearance of a subject, or may be therapeutic.

[0058] In a final aspect of the invention, there is provided the use of any one or more of a fusion protein, nucleic acid sequence, expression vector gelatin-like protein, or host cell of the invention, in the manufacture of a product of the invention. As defined above, such a product may be independently selected from the group comprising of a foodstuff, cosmetic, stabilizer, capsules, biomaterial, medical device, medicament, artificial tissue, pharmaceutical or nutritional supplement, chemical or biochemical reagent, or glue.

### BRIEF DESCRIPTION OF THE DRAWINGS

[0059] The present invention is further described hereinafter with reference to the accompanying drawings and Tables, in which:

[0060] FIG. 1 shows domain architectures of several collagen-like proteins from prophages embedded in the genomes of E. coli O157:H7 and related strains, plus two fragments obtained in recombinant studies. Collagen triple helical domains (THDs) are labelled “Col” and α-helical coiled coils are labelled “PCoil”. Domains labelled as PfN, PCoil, PfC and Pf2 are conserved in bacteriophage and E. coli genomes. EPcIA, EPcIB, EPcIC and EPcID stand for “E. coli phage collagen-like proteins A, B, C and D”, respectively. The Col-PfC fragment is an endogenous proteolytic fragment obtained during recombinant expression of EPcIA. The PfN-PCoil fragment is a recombinant fragment produced during the biochemical study of EPcIA.

[0061] FIG. 2 shows the results of analysis by analytical ultracentrifugation (AUC) of the average molar mass of a sample of pure recombinant EPcIA (rEPcIA, sequence EPcIA-142, Table A) as a function of increasing concentration of the denaturing agent guanidinium chloride (GuHCl). Mean values (inset) are the average of three measures. In the absence of GuHCl, native rEPcIA forms trimers with an observed molecular weight of 138±6 kDa, consistent with the predicted molecular weight of a trimer. As the concentration of GuHCl increases rEPcIA denatures and the trimers dissociate into monomers; at 5 M GuHCl the observed molar mass is 43±1 kDa, which is consistent with the molecular weight of monomer rEPcIA. The trimer-to-monomer transition midpoint is estimated at around 2.5 M GuHCl. Confirmation of rEPcIA trimerisation was obtained from dynamic light scattering experiments (data not shown). Recombinant EPcIA was prepared as follows: (1) the nucleotide sequence for EPcIA was obtained by PCR amplification from a sample of genomic DNA of E. coli O157:H7 (kindly provided by C.W. Penn, University of Birmingham), using designed primers; (2) the amplified product was cloned into a protein expression vector containing poly-histidine tags and the recombinant protein was expressed using standard laboratory E. coli strains (complete amino acid and DNA sequences for rEPcIA are EPcIA-142 and EPcIA-DNA142, given in Table A and E, respectively); (3) rEPcIA was purified using nickel-affinity chromatography followed by size exclusion chromatography.

[0062] FIG. 3 shows the results of Circular Dichroism (CD) spectroscopy analysis of the Col-PfC fragment from rEPcIA (see FIG. 1). (A) The CD spectrum at 4° C. (open circles) shows the characteristic features of a collagen triple-helical structure, with a maximum of positive ellipticity at 220 nm and a deep minimum of negative ellipticity around 200 nm. These collagen features have disappeared in the spectrum at 55° C. (filled circles), indicating that the triple-helical structure has been lost at such temperature. The vertical axis represents molar ellipticity ⊖ in degrees cm² decimole⁻¹. The CD data was collected between 190 and 260 nm, with a protein concentration of 0.2 mg/ml in 10 mM Tris, 150 mM NaCl, pH 7.4. Measurements were taken in a 0.5 mm path length cell. (B) Thermal denaturation of the Col-PfC fragment monitored by CD at 220 nm (the maximum of positive ⊖ in the spectrum of Col-PfC): a sharp transition is observed at 42° C., corresponding to the decrease of ellipticity at 220 nm and loss of collagen conformation. The CD was measured as a function of increasing temperature between 4° C. and 60° C., with a protein concentration of 0.2 mg/ml in 10 mM Tris, 150 mM NaCl, pH 7.4, and a heating rate of 0.33° C./min. Trimeric Col-PfC was obtained as an endogenous proteolytic product during expression of rEPcIA and was purified from full-length rEPcIA by size exclusion chromatography.

[0063] FIG. 4 shows the molecular shape of full-length rEPcIA protein visualised by rotary shadowing electron microscopy. Inset: the rEPcIA protein has a dumbbell shape with two globular regions connected by a partially flexible stalk. This stalk contains a collagen triple helical domain (Col) next to the PfC globular region and an α-helical coiled coil region (PCoil) next to the PfN globular region. The PfN and PfC globular regions are trimeric and contain three PfN and PfC domains each.

[0064] FIG. 5 shows the results of Circular Dichroism (CD) spectroscopy analysis of rEPcIA. (A) The CD spectrum at 4° C. (open circles) is dominated by the signal of an α-helical coiled-coil structure, with two minima of negative ellipticity at 208 nm and 224 nm, respectively. The contribution of the collagen triple helical domain of rEPcIA is reflected in the pronounced local maximum of ellipticity between the two minima, at 216 nm, and the asymmetry between the two minima, the one at 208 nm being deeper. The CD spectrum changes as the temperature increases: at 45° C. (filled triangles), the spectrum maintains the characteristics of the α-helical structure, but with a significant decrease in the maximum at 215 nm and a more symmetrical appearance of the two minima, shifted to 210 nm and 222 nm, respectively; further increase of the temperature results in the disappearance of the two minima and a reduction of the overall negative ellipticity at 55° C. (filled circles), indicating loss of the α-helical coiled coil conformation. The vertical axis represents molar ellipticity β in degrees cm² decimole⁻¹. The CD data was collected between 190 and 260 nm, with a protein concentration of 0.3 mg/ml in 10 mM Tris, 150 mM NaCl, pH 7.4. Measurements were taken in a 0.5 mm path length cell. (B) The thermal denaturation of EPcIA, followed by CD at 216 nm (the maximum between the two minima at 208 nm and 224 nm), shows two transitions: a first transition at 42° C., with decrease in ellipticity, corresponds to the loss of the collagen triple-helical structure and is consistent with the observations on the denaturation of the Col-PfC fragment at the same temperature; a second, sharp transition at 52° C. with a large increase in ellipticity, corresponds to the loss of the α-helical coiled-coil structure of the PCoil and PfN domains. The CD was measured as a function of increasing temperature between 20° C. and 75° C., with a protein concentration of 0.3 mg/ml in 10 mM Tris, 150 mM NaCl, pH 7.4, and a heating rate of 0.33° C./min.

[0065] FIG. 6 shows the molecular shape of the Col-PfC fragment visualised by rotary shadowing electron microscopy. Inset: the Col-PfC has one globular PfC region followed by a rigid stalk containing the collagen triple-helical domain (Col). The region N-terminal to the collagen triple helix (to the left) can be seen as partially unstructured.

[0066] FIG. 7 shows examples of domain structures of class 1 fusion proteins within the context of the present invention. A human collagen triple helical domain sequence (hCol, shown as a grey box in both examples) is fused in frame with one or more prokaryotic or viral trimerisation domains (PVTDs), wherein said human triple helical domain and PVTDs do not naturally form part of the same protein. (A) The hCol domain replaces the Col domain from a bacterial or viral protein with EPcIA architecture. (B) A longer hCol domain replaces the tandem of Col-Pf2-Col domains from a bacterial or viral protein with EPcIB architecture. In both cases three PVTDs are kept flanking the sequence of the hCol domains.

[0067] FIG. 8 shows the domain structure of a class 2 fusion protein within the context of the present invention. A human collagen triple helical domain sequence (hCol, shown as a grey box) is fused in frame with one or more prokaryotic or viral trimerisation domains (PVTDs), and one or more triple helical domains from bacterial or viral origin, wherein said human collagen and the bacterial and viral domains do not naturally form part of the same protein. The prokaryotic or viral Col domains flanking the hCol domain can be partial fragments of the original Col domain or they can be obtained from other bacterial or viral sequences.

[0068] FIG. 9 shows examples of domain structures of class 3 fusion proteins within the context of the present invention. Designed collagen triple helical domain sequences are built from the fusion in frame of several prokaryotic or viral collagen triple helical domains, which can be identical (A) or different (B) and can be obtained from the same (A) or different (B) prokaryotic or viral collagen-like proteins. The extended triple helical domain sequences are in turn fused in frame with one or more prokaryotic or viral trimerisation domains (PVTDs), wherein the resulting fusion proteins are not identical to naturally occurring proteins.

[0069] FIG. 10 shows examples of different domain architectures of possible fusion proteins within the context of the present invention. In class I fusion proteins (A), one or more eukaryotic triple helical domains (e.g. human or animal sequences, shown as grey boxes), are fused in frame with different combinations of PVTDs. In class II fusion proteins (B), triple helical domains made of combinations of sequences from eukaryotic (e.g. human or animal) and prokaryotic or viral origin are fused in frame with different PVTDs. In class III fusion proteins (C), newly designed triple helical domains are built from sequences of several prokaryotic or viral collagen triple helical domains, which can be identical or different and from the same or different original sequence. The designed triple helical domain sequences are fused in frame with different combinations of PVTDs.

[0070] FIG. 11 shows schematically the domain architecture of three class 1 fusion proteins (recombinant hybrids, RCH) used in the examples that illustrate the present invention. Amino acid sequences for the three RCH proteins are given in Table W (RCH-1 to RCH-3) and DNA coding sequences are given in Table W (RCHDNA-1 to RCHDNA-3). Each RCH is built from the combination in frame of several domains, their sequences identified numerically (e.g. PfN-28, PfC-61). Amino acid sequences for the different PfN, PCoil and PfC domains are given in Tables H, I and J; DNA sequences for the same domains are given in Figures M to R. The human collagen THDs in these examples are different fragments of the human collagen sequence hCol-03 (the THD of collagen α1(II) chain, Table K); each fragment is identified by its residue numbers in the hCol-03 sequence. Black stars indicate natural integrin binding sites with GFPGER sequence. The white star in RCH-2 indicates a second, engineered GFPGER integrin-binding site.

[0071] FIG. 12 shows an analysis by SDS-PAGE (10%) of the expression of RCH-3 in E. coli cells. Protein bands are stained with Coomassie Brilliant Blue. Lane labels: M, molecular weight markers, in kDa; Un, uninduced sample; In, sample induced with 0.1 mM IPTG at 12° C. for 93 hours; Ly, lysate of induced sample after sonication; So, soluble fraction; In, insoluble fraction. The RCH-3 protein band migrates slower than expected, at approximately 60 kDa, a characteristic feature of collagen-like proteins. RCH-3 is expressed predominantly in the soluble fraction.

[0072] FIG. 13 shows the structural organisation of the RCH-1 protein visualised by rotary shadowing electron microscopy. The molecular shape of RCH-1 is identical to that of the EPcIA protein (FIG. 4): a dumbbell shape with two globular regions connected by a partially flexible stalk. The stalk contains the collagen THD fragment next to the PfC globular region and an α-helical coiled-coil region (PCoil) next to the PfN globular region. The PfN and PfC globular regions are trimeric and contain three PfN and PfC domains each.

[0073] FIG. 14 shows the structural organisation of the RCH-2 protein visualised by rotary shadowing electron microscopy. The molecular shape of RCH-2 is similar to that of the RCH-1 protein (FIG. 13), but with a much longer stalk due to the larger collagen THD fragment (360 residues in RCH-2 for 111 residues in RCH-1).

[0074] FIG. 15 shows the structural organisation of the RCH-3 protein visualised by rotary shadowing electron microscopy. The molecular shape of RCH-1 is similar to that of the RCH-1 protein (FIG. 13), with two globular regions joined by a partially flexible stalk, which contains the human collagen THD fragment. Each molecule shows one of the globular regions more clearly defined than the other one. This sample corresponds to the low molecular weight fraction of RCH-3, which has a significantly lower concentration of protein.

[0075] FIG. 16 illustrates the formation of dendrimer-like structures by RCHs via association of PVTDs. (A): Detail of an electron micrograph of RCH-3 molecules showing self-associated structures; the central aggregated cores appear to form by association of the PfC domains. The majority of RCH-3 molecules associate in this way generating large molecular weight structures. (B): Detail of an electron micrograph of RCH-1 molecules showing a similar self-associated structure; molecules associate through their PfC domains forming a ring-like core from which the collagen THDs and the PCoil-PfN domains radiate. Formation of such structures by RCH-1 is rare, but association of few molecules through their PfC domains is more common.

[0076] FIG. 17 shows the CD spectrum of RCH-1 at 4° C. The spectrum is similar to that of the bacterial collagen-like protein rEPcIA (FIG. 5A), and results from the combination of the signals of the collagen THD and the α-helical coiled-coil structure of the PCoil domain. The contribution of the collagen THD is reflected in the hump around 218 nm and the asymmetry between the α-helical minima at 208 nm and 222 nm (the former being much deeper).

[0077] FIG. 18 shows the thermal denaturation of RCH-1 followed by CD at 222 nm. Two transitions are observed: a first transition, with decrease in ellipticity and midpoint at 33° C., corresponds to the loss of triple-helical structure from the collagen THD; a second transition at 53° C., with a large increase in ellipticity, corresponds to the loss of the α-helical coiled-coil structure from the PCoil domain.

[0078] FIG. 19 shows the CD spectrum of RCH-2 at 4° C. The spectrum is similar to those of rEPcIA (FIG. 5A) and RCH-1 (FIG. 17), but in this case there is less α-helical coiled-coil contribution, probably due to the differences in the sequences of the PfN and PCoil domains from RCH-1 and RCH-2 (FIG. 11). The contribution of the collagen THD is reflected in the hump around 220 nm and the deep minimum at 203 nm.

[0079] FIG. 20 shows the thermal denaturation of RCH-2 followed by CD at 220 nm. As in the case of RCH-1 (FIG. 18), two transitions are observed: a first transition around 32° C., with decrease in ellipticity, corresponds to the loss of triple-helical structure from the collagen THD; a second transition at 41° C., with a large increase in ellipticity, corresponds to the loss of the α-helical coiled-coil structure from the PCoil domain.

[0080] FIG. 21 shows the spreading of HT1080 cells on RCH-3. (A) Negative control: HT1080 cells plated directly on plastic show a rounded morphology and do not spread. (B) HT1080 cells plated on plastic coverslips coated with 10 μg/ml RCH-3 show evidence of spreading. (C) Positive control: HT1080 cells plated on plastic coated with rat tail collagen (2 μg/ml). Cells were fixed after 90 minutes spreading at 37° C.

[0081] FIG. 22 shows the spreading of HT1080 cells on RCH-1 at different concentrations: (A) 20 μg/ml; (B) 30 μg/ml; (C) 50 μg/ml. Cells were fixed after being allowed to spread for 90 minutes at 37° C. on plastic coverslips coated with RCH-1.

[0082] FIG. 23 shows the percentage of spreading of HT1080 cells on surfaces coated with rat-tail collagen (filled squares) and RCH-3 (open circles) at different protein concentrations.

[0083] FIG. 24 shows schematically the domain architecture of the RCH-4 fusion protein. The amino acid sequence RCH-4 and the DNA coding sequence RCHDNA-4 are given below. RCH-4 is built from the combination in frame of two domains: PfN-15 and a THD containing residues 400-651 from hCol-03. The amino acid sequence for PfN-15 is given in Table H, and its DNA sequence is given in Tables M and N. The human collagen sequence hCol-03 is given in Table K. The black star indicates a natural integrin-binding site with GFPGER sequence.

[0084] FIG. 25 shows the CD spectrum RCH-4 at 4° C. The spectrum is very similar to that of a collagen THD, with a hump around 218 nm and a deep minimum at 195 nm.

[0085] Table A shows the amino acid sequences of EPcIA proteins. Each sequence is identified with a unique EPcIA-nnn code (EPcIA-001 to EPcIA-142), as well as its UniProt sequence identifier. Sequence EPcIA-142 corresponds to the recombinant construct rEPcIA used in biochemical studies.

[0086] Table B shows the amino acid sequences of EPcIB proteins. Each sequence is identified with a unique EPcIB-nnn code (EPcIB-001 to EPcIB-021), as well as its UniProt sequence identifier.

[0087] Table C shows the amino acid sequences of EPcIC proteins. Each sequence is identified with a unique EPcIC-nnn code (EPcIC-001 to EPcIC-005), as well as its UniProt sequence identifier.

[0088] Table D shows the amino acid sequence of EPcID proteins. Only one sequence is known to date, EPcID-001. Its UniProt sequence identifier is also provided.

[0089] Table E shows the DNA sequences of EPcIA proteins. Each sequence is identified with a unique EPcIA-DNAnnn code (EPcIA-DNA001 to EPcIA-DNA142), as well as its UniProt and genome sequence identifiers (EMBL/GenBank). Sequence EPcIA-DNA142 corresponds to the recombinant construct rEPcIA used in biochemical studies.

[0090] Table F shows the DNA sequences of EPcIB proteins. Each sequence is identified with a unique EPcIB-DNAnnn code (EPcIB-DNA001 to EPcIB-DNA021), as well as its UniProt and EMBL/GenBank sequence identifiers.

[0091] Table G shows the DNA sequences of EPcIC and EPcID proteins. Each sequence is identified with a unique EPcIC/D-DNAnnn code (EPcIC-DNA001 to EPcIC-DNA005; EPcID-DNA001), as well as its UniProt and EMBL/GenBank sequence identifiers.

[0092] Table H shows a non-redundant set of amino acid sequences of PfN capping domains from prokaryotic and viral collagen-like proteins. Each sequence is identified with a unique PfN-nn code (PfN-01 to PfN-86).

[0093] Table I shows a non-redundant set of amino acid sequences of PCoil capping domains from prokaryotic and viral collagen-like proteins. Each sequence is identified with a unique PCoil-nn code (PCoil-01 to PCoil-46).

[0094] Table J shows a non-redundant set of amino acid sequences of PfC capping domains from prokaryotic and viral collagen-like proteins. Each sequence is identified with a unique PfC-nnn code (PfC-01 to PfC-61).

[0095] Table K shows the amino acid sequences of the THD domains from human collagens. Each sequence is identified with a unique hCol-nn code (hCol-01 to hCol-49), as well as its UniProt sequence identifier.

[0096] Table L shows the amino acid sequences of the THD domains from human collagen-like proteins. Each sequence is identified with a unique hCol-nn code (hCol-50 to hCol-89), as well as its UniProt sequence identifier.

[0097] Table M shows non-degenerate DNA sequences for the PfN capping domains from Table H, obtained using the most likely codons for expression in E. coli. Each sequence is identified with a unique PfN-DNAnn code (PfN-DNA01 to PfN-DNA86).

[0098] Table N shows degenerate DNA sequences for the PfN capping domains from Table H, using a consensus IUPAC/IUB notation sequence derived from all possible codons for each amino acid (NC-IUB (1985) Biochem. J. 229: 281-286). Each sequence is identified with a unique PfN-CNAnn code (PfN-CNA01 to PfN-CNA86).

[0099] Table O shows non-degenerate DNA sequences for the PCoil capping domains from Table I, obtained using the most likely codons for expression in E. coli. Each sequence is identified with a unique PCoil-DNAnn code (PCoil-DNA01 to PCoil-DNA46).

[0100] Table P shows degenerate DNA sequences for the PCoil capping domains from Table I, using the same consensus IUPAC/IUB notation sequence as in Table N. Each sequence is identified with a unique PCoil-CNAnn code (PCoil-CNA01 to PCoil-CNA46).

[0101] Table Q shows non-degenerate DNA sequences for the PfC capping domains from Table J, obtained using the most likely codons for expression in E. coli. Each sequence is identified with a unique PfC-DNAnn code (PfC-DNA01 to PfC-DNA61).

[0102] Table R shows degenerate DNA sequences for the PfC capping domains from Table J, using the same consensus IUPAC/IUB notation sequence as in Table N. Each sequence is identified with a unique PfC-CNAnn code (PfC-CNA01 to PfC-CNA61).

[0103] Table S shows non-degenerate DNA sequences for the THD domains of human collagens (Table K), using the most likely codons for expression in E. coli. Each sequence is identified with a unique hCol-DNAnn code (hCol-DNA01 to hCol-DNA49).

[0104] Table T shows non-degenerate DNA sequences for the THD domains of human collagen-like proteins (Table L), using the most likely codons for expression in E. coli. Each sequence is identified with a unique hCol-DNAnn code (hCol-DNA50 to hCol-DNA89).

[0105] Table U shows degenerate DNA sequences for the THD domains of human collagens (Table K), using the same consensus IUPAC/IUB notation sequence as in Table N. Each sequence is identified with a unique hCol-CNAnn code (hCol-CNA01 to hCol-CNA49).

[0106] Table V shows degenerate DNA sequences for the THD domains of human collagen-like proteins (Table L), using the same consensus IUPAC/IUB notation sequence as in Table N. Each sequence is identified with a unique hCol-CNAnn code (hCol-CNA50 to hCol-CNA89).

[0107] Table W shows the amino acid sequences of the fusion, recombinant collagen hybrid proteins (RCH) used in the examples provided. Each sequence is identified with a unique RCH-n code (RCH-1 to RCH-3). See FIG. 11 for the domain composition of each RCH protein. Integrin-binding sites (sequence GFPGER) are underlined on each RCH sequence. Table W also shows the DNA sequences coding for the fusion, recombinant collagen hybrid proteins (RCH) used in the examples provided. Each sequence is identified with a unique RCHDNA code (RCHDNA-1 to RCHDNA-3). The restriction digestion sites BamI (GGATCC) and EcoRI (GAATTC) restriction digestion sites are underlined on each sequence. These sites were used to clone each sequence into different protein expression vectors.

### DETAILED DESCRIPTION

[0108] Traditionally, production of mammalian collagens and gelatines in bacterial systems has had limited success due to problems of low-yield, poor solubility, and lack of stability. The present invention is based upon the discovery of the exceptional stability and solubility properties of the collagen-like proteins from bacteria, particularly E. coli, particularly E. coli O157:H7. The present invention has opened the opportunity for a high-yield production of more soluble and more stable recombinant eukaryotic collagens in prokaryotes.

[0109] The present invention differs from the methods of the prior art in the use of PVTDs for the engineering of hybrid sequences comprising eukaryotic collagen or collagen-like domains in tandem with PVTDs. It is based on the identification of collagen-like protein sequences in the genomes of prokaryotes, such as gram negative bacteria, such as E. coli, such as strain O157:H7, and in bacteriophages or prophages infecting these strains or embedded in their genomes. These collagen-like protein sequences may be of bacteriophage origin. At least three different domain architectures have been identified (FIG. 1), in more than a hundred and sixty sequences (EPcIA-001 to EPcIA-141; EPcIB-001 to EPcIB-021; EPcIC-001 to EPcIC-005; EPcID-001), with several sequences known for each domain arrangement. Within any given domain architecture, different sequences show variability in the length of their collagen triple helical domains. These collagen-like structures share conserved domains, herein named PfN, PfC, PCoil and Pf2, which flank both sides of the collagen or collagen-like triple helical domains (FIG. 1).

[0110] The collagen-like proteins encoded by these sequences share structural characteristics with eukaryotic collagen proteins. The EPcIA protein from the Sakai strain of E. coli O157:H7 forms trimeric assemblies (FIG. 2), which show unusually high thermal stability for a collagen triple helical domain without hydroxyproline residues. Rotary shadowing electron microscopy of EPcIA reveals a dumbbell structure (FIG. 3) where the PfN and PfC domains form globular domains that are linked by a flexible stalk made of a collagen triple helix and a very stable, trimeric α-helical coiled coil (FIG. 5).

[0111] The fusion proteins of the present invention comprising a eukaryotic collagen domain and a PVTD have the advantage of being more thermally stable, having increased solubility and being composed of polypeptide monomers which are more resistant to degradation within a host cell. Preferably, the fusion proteins of the invention exhibit one or more of the above-mentioned characteristics, preferably two or more of said characteristics.

[0112] A “fusion protein or polypeptide” within the context of the present invention means a protein or polypeptide having two or more different amino acid sequences which are not naturally found in the same protein i.e. are heterologous to each other. Specifically, the fusion protein or polypeptide of the present invention may comprise a eukaryotic collagen or collagen-like domain and a heterologous PVTD. Preferably, a fusion protein or polypeptide of the invention may comprise one or more eukaryotic collagen or collagen-like domains. More preferably, the fusion protein or polypeptide of the invention may comprise two or more eukaryotic collagen or collagen-like domains. The fusion protein or polypeptide of the invention may comprise one or more prokaryotic or viral collagen or collagen-like domains, including those which do not mediate trimerisation. Preferably, the fusion protein does not comprise prokaryotic or viral collagen or collagen-like domains. Thus, preferably, substantially all the collagen or collagen-like domains of the fusion protein or fusion polypeptide are eukaryotic.

[0113] A fusion protein of the invention is trimeric, composed of three polypeptide chains. Preferably, at least the collagen- or collagen-like domains of the polypeptide chains cooperate to form a triple helix, of a collagen-like structure (Beck et al J Structural Biol 122 17-20 1998). A part of the fusion protein of the invention may be composed of an alpha helical coiled coil structure, or alternative three dimensional structures. Each polypeptide chain may be composed of one or more fusion polypeptides, as disclosed herein, or may be composed of any combination of one or more eukaryotic collagen or collagen-like domains, PVTD's or other prokaryotic or viral domains or eukaryotic or prokaryotic or viral functional sequences. Operably linked, these polypeptides may form a polypeptide chain.

[0114] The fusion protein or polypeptide of the invention may comprise a PVTD. Herein, a PVTD is a domain which is capable of mediating trimerisation of polypeptide chains, preferably into a triple helical structure. Preferably, a PVTD is capable of maintaining a triple helical structure below the melting temperature of a collagen or collagen like domain of the polypeptide chains, and preferably is capable of maintaining the polypeptide chains as a trimer below the melting temperature of a PVTD of the fusion protein. Preferably, a PVTD is prokaryotic or viral in origin.

[0115] Herein, a PVTD may serve as a capping domain, or to mediate one or more of the functional characteristics of the fusion proteins of the invention, as defined above.

[0116] Preferably, a fusion protein or polypeptide of the invention comprises in tandem heterologous sequences from different organisms. For example, the fusion protein or polypeptide may comprise in tandem a PVTD, a eukaryotic collagen or collagen like sequence, and a second or further PVTD. Alternatively, and by way of example, a fusion protein or polypeptide of the invention may comprise a eukaryotic collagen or collagen-like domain comprising therein a PVTD, and having at one or both ends a further PVTD. It will be apparent to the skilled person that any combination of one or more sequences independently selected from the groups consisting of one or more eukaryotic collagen or collagen-like domains, one or more PVTDs, one or more eukaryotic, prokaryotic or viral functional sequences, one or more prokaryotic or viral collagen or collagen-like domains and one or more non-collagen sequences may be provided in a fusion protein or polypeptide of the invention. Preferably, heterologous sequences will be operably linked to each other, for example by peptide bonds or chemical linkage, to form a fusion protein or polypeptide.

[0117] In the fusion protein or polypeptide, a PVTD may be provided:

i) within a eukaryotic collagen or collagen-like domain; and/or
ii) flanking one or both ends of a eukaryotic collagen or collagen-like domain;
iii) within non-eukaryotic collagen or collagen-like domain of the fusion polypeptide and/or flanking one or both ends thereof.

[0118] Any combination of the above independently selected options are provided for within the scope of the present invention. Where more than one PVTD is present, all may be provided internally within the eukaryotic sequence. Alternatively, one or more PVTDs may be provided flanking a collagen or collagen-like domain. More preferably, each polypeptide chain will be flanked at one or both ends by a PVTD, such that they are able to mediate the formation of a trimeric, preferably triple helical, fusion protein.

[0119] The PVTDs in each polypeptide chain of a trimeric fusion protein may all be the same or some or all may be different. By “flanked” means positioned at one or both ends of a sequence, preferably a heterologous sequence, for example a eukaryotic collagen or collagen-like domain. It is appreciated that a PVTD must be operably linked to a sequence of the fusion protein or polypeptide, but it is not necessary for a PVTD to follow immediately from a collagen or collagen-like domain. Thus, linker, spacer, or indeed other functional sequences may be provided between a sequence, preferably a heterologous sequences, preferably a eukaryotic collagen or collagen-like domain, and a PVTD.

[0120] Preferably, any PVTD on the three polypeptide chains of a trimeric fusion protein will be positioned such that they are able to associate in such a manner that the three polypeptide chains are able to form a trimeric, and preferably a triple helical, protein. For example, PVTDs may flank one (preferably the same) or both ends of a eukaryotic collagen or collagen-like domain in all three polypeptide chains, e.g. the N terminal or C terminal end. Alternatively, where a PVTD is an internal sequence, it may all be positioned within a pre-determined number of amino acids from an end of the polypeptide chain or a collagen or collagen-like domains (eukaryotic, prokaryotic or viral). PVTDs can be used to bring together polypeptide sequences of the same or different lengths as a trimer. Where different, PVTDs will be positioned such that formation of a trimer is possible. For example, a PVTD may be provided at one end of a polypeptide chain, and internally in another chain, such that PVTDs meet by folding of the latter polypeptide chain. Preferably, PVTDs may be provided at a non-folded end of the three chains. The optimum positioning of PVTDs in polypeptide chains of different lengths can be determined by a person skilled in the art using their common general knowledge of collagen. Also envisaged is an embodiment where one or more corresponding PVTDs capable of associating with each other are provided on two of the three polypeptide chains.

[0121] In addition to PVTDs, the fusion proteins or polypeptides of the invention may further comprise one or more prokaryotic domains. These may be provided in tandem with a eukaryotic collagen or collagen-like domain, a PVTD, a functional sequence, or any other part of the fusion polypeptide. Such a prokaryotic domain may be provided or flanking within one of the afore-mentioned eukaryotic or PVTD sequences. Such a prokaryotic domain will preferably be collagen-derived. Such a prokaryotic domain may be any functional sequence, including, for example, stabilization sequences, binding sites, cysteine cross links, cleavage sites, linkage sites, and indeed any other suitable sites which may provide desirable functionalities in the fusion protein. The prokaryotic domain may be naturally occurring, or a fragment, derivative, variant or modified version of a naturally occurring prokaryotic domain. In this embodiment, the terms naturally occurring, fragments, derivatives, variants, and modified are as defined above in relation to eukaryotic collagen or collagen-like domains and PVTDs. Such prokaryotic domains will preferably be operably linked to the eukaryotic collagen or collagen-like domain and/or other prokaryotic sequences and/or PVTDs. Where more than one prokaryotic domain is provided in a fusion protein or polypeptide of the invention, one or more of these may be independently selected from the groups consisting of stabilization sequences, binding sites, cysteine cross links, cleavage sites, linkage sites, and indeed any other suitable sites which may provide desirable functionalities in the fusion protein.

[0122] The fusion protein or polypeptide of the invention may comprise one or more non-collagen domains. Such non-collagen domains do not contain the repetitive Gly-X-Y amino acid sequence defined above, and/or do not have the ability to form a trimer or triple helical domain.

[0123] In a preferred embodiment of the present invention, the eukaryotic collagen or collagen-like domain sequence, any prokaryotic or viral collagen or collagen-like domain, and/or one or both PVTDs may be engineered to comprise non-native sequences. For example, a human collagen or collagen-like domain present in a fusion polypeptide or protein of the first aspect of the invention may have been engineered to contain non-native integrin binding sties, or non-native binding sites for other receptors or other collagen-binding proteins from the extracellular matrix or elsewhere. In another example, one or more of the PVTDs from one or more fusion polypeptides or proteins of the invention may have been engineered to promote heterotrimeric associations rather than homotrimeric ones.

[0124] The triple helical fusion protein may be a homotrimer, or a heterotrimer. In a homotrimer, the three polypeptide chains making up the triple helix are identical, in terms of sequence. In a heterotrimer, two or more of the three polypeptide chains are non-identical in terms of sequence. In both homotrimers and heterotrimers, the one or more prokaryotic or viral sequences in two or more of the three polypeptide chains may be the same or different. The three polypeptide chains may be the same or different in length. Preferably, the three polypeptide chains making up a triple helical protein will be substantially the same length, or at least any difference in length of the triple helical region is less than 70%, 60%, 50%, 40%, 30%, 20% or 10% compared to one or both of the triple helical regions from the remaining chains in the helix.

[0125] Preferably, in a homotrimer where PVTDs are provided within the eukaryotic collagen or collagen-like domain, these will be substantially the same in all three polypeptide chains, except where it may be functionally desirable for part of one of the polypeptide chains to be heterotrimeric, for example for steric reasons to form an exposed binding site or cleavage site. Where PVTDs are provided at one or both ends of the eukaryotic collagen or collagen-like domain, these may the same or different between two or more of the polypeptide chains of the invention, in homotrimers or heterotrimers, as long as trimerisation of the three polypeptide chains remains possible. Preferably, the PVTDs which are intended to cooperate with each other on the three polypeptide chains will be the same.

[0126] It is envisaged that any number and combination of PVTDs may be provided in any one fusion polypeptide or protein, with any number and combination of eukaryotic collagen or collagen-like domains. Thus, any one, two, three, four, five, six, seven, eight, nine, ten or more independently selected PVTDs may be provided in combination with any one, two, three, four, five, six, seven, eight, nine or ten or more independently selected eukaryotic collagen sequences. To avoid lengthy recitation of preferred embodiments, the present invention expressly provides for fusion proteins or fusion polypeptides comprising

a) one or more PVTD independently selected from
[0127] i) a PVTD of any of EPcIA-001 to EPcIA-142 of Table A, any of EPcIB-001 to EPcIB-021 of Table B, any of EPcIC-001 to EPcIC-005 of Table C, or EPcID-001 of Table D, any of PfN-01 to PfN-86 of Table H, any of PCoil-01 to PCoil-46 of Table I, any of PfC-01 to PfC-61 of Table J, and a Pf2 sequence, preferably one of the Pf2 domains in sequences any of EPcIB-001 to EPcIB-021 of Table B;
[0128] ii) having an amino acid sequence having at least 50%, 60%, 70%, 80%, 90%, 91%, 92%, 93%, 94%, 95%, 96%, 97%, 98% or 99% sequence identity with a PVTD of i); or
[0129] iii) encoded by a nucleic acid selected from the group consisting of sequences of Tables E to G and M to R or a nucleic acid sequence having at least 50%, 60%, 70%, 80%, 90%, 91%, 92%, 93%, 94%, 95%, 96%, 97%, 98% or 99% sequence thereto, or
[0130] iv) a fragment or derivative of an afore-mentioned sequence which functions as a PVTD
   b) one or more eukaryotic collagen or collagen-like domains independently selected from
[0131] i) a human fibrillar collagen chain selected from α1(I), 2(1), α1(II) and α1(III);
[0132] ii) a eukaryotic collagen or collagen-like domain comprising a sequence selected from the group consisting of sequences hCol-01 to hCol-89 of Table K and L, or
[0133] iii) a sequence consisting of a sequence selected from the groups consisting of the human collagen sequences any of hCol-01 to hCol-49 of Table K and the collagen-like domains of any of hCol-50 to hCol-89 of Table L;
[0134] iv) a domain or sequence having at least 50%, 60%, 70%, 80%, 90%, 91%, 92%, 93%, 94%, 95%, 96%, 97%, 98% or 99% sequence identity with a sequence of i) ii) or iii);
[0135] v) fragments, variants or derivatives of a sequence of any of i) to iv).

[0136] It will be appreciated that each and every combination of one or more eukaryotic collagen or collagen-like domain and one or more PVTD is provided by the present invention, which is not limited to the specific examples provided herein. Thus, any one or more of the above mentioned sequences may be provided as a fusion protein or polypeptide with any one or more of the above mentioned sequences. However, examples of preferred fusion polypeptides of the present invention are provided in FIGS. 1, 7, 8, 9, 10 and 11, and RCH 1 to 3 of the Examples.

[0137] In a preferred embodiment, the present invention provides a eukaryotic collagen or collagen-like domain wherein only one end of the eukaryotic domain is flanked by a PVTD. Preferably, the PVTD is one which serves as a capping domain.

[0138] A fusion protein or polypeptide of the invention may be polymerized or linked to a peptide or non-peptide coupling partner such as, but not limited to, an elongation factor, a stabilization factor, an effector molecule, a label, a marker, a drug, a toxin, a carrier or transport molecule or a targeting molecule such as an antibody or binding fragment thereof or other ligand. A preferred elongation factor is the prokaryotic protein, NusA. A preferred purification tag is GST. Techniques for coupling proteins to both peptide and non-peptide coupling partners are well-known in the art, and include recombinant DNA technology such that where the coupling partner is a protein, it may be expressed in-frame with the fusion polypeptide or protein.

[0139] The fusion protein or polypeptide may be crosslinked by thermal dehydration, chemical, and/or light treatment. Techniques for cross-linking proteins are well-known to those of skill in the art.

[0140] In addition, the fusion protein or polypeptide may undergo post-translational modifications. Such modifications include, but are not limited to, acetylation, carboxylation, glycosylation, phosphorylation, lipidation and acylation. Post-translational processing which cleaves a precursor form into a mature form of the protein may also be important for correct insertion, folding and/or function.

[0141] Herein, the terms “collagen” or “collagen-like” refer to proteins or polypeptide chains which comprise Gly-X-Y triplet sequences with a minimum of three triplets in any of its three registers (that is . . . Gly-X-Y-Gly-X-Y-Gly-X-Y . . . , . . . Y-Gly-X-Y-Gly-X-Y-Gly-X . . . , or . . . X-Y-Gly-X-Y-Gly-X-Y-Gly . . . ), independently of the polypeptides forming trimers or proteins forming a triple helical structure or not. Thus, the definition of collagen or collagen-like domains refers to the occurrence of the repetitive sequence at the primary structure level, and bears no implications for the actual secondary, tertiary or quaternary structures of the polypeptide or protein containing it. This particular sequence enables collagen to form its characteristic triple-helical structure. The term “triplet” refers to a set of three amino acids as defined by the set Gly-X-Y, wherein X and Y can be any amino acid. In the present invention, the term “collagen” includes naturally occurring collagen, and fragments, domains, derivatives, mimetics, variants and chemically modified compounds of said naturally occurring collagen. Preferably, the eukaryotic collagen or collagen-like domain of the invention will be capable of mediating one or more collagen activities, such as being able to bind to cell surface molecules such as integrin or fibronectin, or glycoproteins or proteoglycans, or will be derived from a eukaryotic collagen protein which is capable of mediating one or more such activities.

[0142] All human, mammalian, vertebrate and metazoan collagen types contain one or more THDs (triple helical domains) that are often flanked and/or separated by non-collagen domains (often referred in the literature as NC domains). Additionally, human, mammalian, vertebrate and metazoan genomes show instances of collagen-like proteins not formally identified as collagens at present but that contain one or more instances of triple helical domains. Additionally, many putative proteins containing triple helical domains in their primary sequence have been identified in prokaryotic and viral genomes. These proteins are usually referred to as “collagen-like proteins”. Collagen may be distinguished from collagen-like proteins because the three polypeptide chains are staggered, such that at least at one end of the protein the three chains are not the same length.

[0143] Although the present invention is described with reference to type I collagen, which is the most commonly used collagen in industry, the term “collagen” as used herein refers to any one of the known collagen types, including collagen types I through XXIX, as well as to any other collagens, and prokaryotic or eukaryotic.

[0144] A fragment of a collagen or collagen-like protein, for use in the present invention, preferably comprises a repetitive Gly-X-Y amino acid sequence. It may be a single chain polypeptide or may form a trimer and more preferably a characteristic collagen triple helical structure under suitable temperature, pH or solvent conditions. In the present invention, a fragment may include three or more triplets, in any of its three registers (for example . . . Gly-X-Y-Gly-X-Y-Gly-X-Y . . . , . . . Y-Gly-X-Y-Gly-X-Y-Gly-X . . . , or . . . X-Y-Gly-X-Y-Gly-X-Y-Gly . . . ). Fragments of collagen or collagen-like proteins or polypeptides of the invention have no maximum length. They may have a defined minimum or maximum length. In the present invention, the fragments may be uninterrupted. Alternatively, they may additionally comprise naturally occurring interruptions or engineered interruptions in the repetitive sequence. The interruptions may range from one to several amino acids, and may affect the function of the fragment. Fragments of the present invention may be capable of mediating one or more functions of naturally occurring collagen, such as being able to bind to cell surface molecules such as integrin or fibronectin, other collagen receptors, other collagen-binding proteins, nucleic acids, sugars and polysaccharides, glycoproteins, proteoglycans, lipids, lipoproteins, metals, inorganic salts, or mineral crystals. Preferably, a fragment may comprise one or more specific domains of the naturally occurring sequence, for example domains having a desired functionality.

[0145] A collagen or collagen-like polypeptide chain will preferably have a helical structure. The helix may be right handed or left-handed preferably the latter, and preferably will have the ability to form trimers and most preferably triple helical structures with two other collagen or collagen-like polypeptide chains. A collagen or collagen-like protein will typically be a trimer, and more preferably will have a triple helical structure. Thus, the term “triple helical” in relation to collagen will be well understood by persons skilled in the art to mean twisted together to form a coiled coil structure, either right or left handed. The collagen proteins referred to herein will preferably have the ability to form super-coiled-coil structures, micro-fibrillar and fibrillar structures, or network or mesh, or any other supramolecular structures similar to those observed in different collagen types in humans or animals.

[0146] A eukaryotic collagen or collagen-like domain of the fusion protein or polypeptide will be derived from invertebrate or vertebrate collagen or collagen-like proteins. Preferably, vertebrate sources include mammalian, ruminate, fish or human. The eukaryotic collagen or collagen-like domain of the fusion protein of polypeptide may be non-chimeric or chimeric, such that it is composed of two or more heterologous collagen or collagen-like domains, from different proteins, operably linked to form a single collagen or collagen-like domain. The different collagen or collagen-like domains within the chimeric collagen or collagen-like domain of the fusion protein or polypeptide may be independently selected from the group consisting of invertebrate or vertebrate sources, for example mammalian, ruminate, fish, or human collagen or collagen-like proteins. In any one fusion protein or polypeptide of the invention, where more than one eukaryotic collagen or collagen-like domains are present, all may non-chimeric, or alternatively one or more may be chimeric. Where more than one eukaryotic collagen or collagen-like domains are present, one or more of these may be independently selected from invertebrate or vertebrate, for example from the groups consisting of mammalian, ruminate, fish and human domains.

[0147] Preferably, a eukaryotic collagen or collagen-like domain may comprise a human fibrillar collagen chain selected from α1(I), 2(I), α1(II) and α1(III), or a fragment or derivative thereof. Most preferably, a eukaryotic collagen or collagen-like domain of the fusion protein or polypeptide may comprise a sequence selected from the group consisting of sequences hCol-01 to hCol-89 of Table K and L. Where more than eukaryotic collagen or collagen-like domains are present in the fusion protein or polypeptide, one or more of these may independently comprise a sequence selected from the groups consisting of the human collagen sequences hCol-01 to hCol-49 of Table K and the collagen-like domains of hCol-50 to hCol-89 of Table L, or variants or derivatives thereof, or fragments thereof. SwissProt/Uniprot accession codes for the above-mentioned human collagen chains are provided in Table K and L (for example P02452 for the human α1(I) chain; P08123 for the human α2(I) chain; P02458 for the α1(II) chain; P02461 for the human α1(III) chain; etc). Derivatives or variants are sequences which share at least 60%, preferably 70%, 75%, 80%, 85%, 90%, 91%, 92%, 93%, 94%, 95%, 96%, 97%, 98%, or 99% sequence identity with one or more of the above human fibrillar collagen chains or fragments thereof, of a human collagen or collagen-like domain as defined by one or more sequences of hCol-01 to hCol-89 of Table K and L, or fragments thereof.

[0148] Herein, preferably, a PVTD is derived from a collagen or collagen-like protein. Being a prokaryotic or viral trimerisation domain, the PVTD is preferably derived from prokaryotic or viral collagen or collagen-like proteins, and more preferably from a viral or bacterial sequence present within a prokaryotic cell genome, preferably a bacterial cell genome, preferably a gram negative bacterial cell genome, preferably an E. coli genome, and most preferably from a O157:H7 E. coli strain. Preferably, the sequence is phage derived. It is envisaged that PVTDs from non-collagen proteins which naturally form trimers and/or triple helices may also be suitable for use in the present invention. Examples of PVTDs from non-collagen proteins are PfN domains from side tail fibre proteins in phages and E. coli genomes, “Collar” domains and “phage tail fibre” repeats domains in tail fiber family proteins, C-terminal domains from trimeric fibritin molecules, or other similar proteins or molecules known to persons skilled in the art.

[0149] Reference herein to “a” PVTD within a fusion protein or polypeptide includes either a single PVTD or a plurality of PVTD's. Thus, a fusion protein or polypeptide of the invention may comprise one, two, three, four, five, six, seven, eight, nine or ten or more independently selected PVTD's.

[0150] Reference herein to a PVTD includes both the monomeric form, and a dimeric or trimeric form.

[0151] The PVTD may be provided within the eukaryotic collagen or collagen-like domain, and/or at one or both ends thereof. A PVTD provided at the end of a eukaryotic domain may serve as a capping domain.

[0152] Preferred PVTD domains of the present invention may be independently selected from

i) the group consisting of any one of EPcIA-001 to EPcIA-142 of Table A, EPcIB-001 to EPcIB-021 of Table B, EPcIC-001 to EPcIC-005 of Table C, or EPcID-001 of Table D, PfN-01 to PfN-86 of Table H, PCoil-01 to PCoil-46 of Table I, PfC-01 to PfC-61 of Table J, and a Pf2 sequence, preferably one of the Pf2 domains in sequences EPcIB-001 to EPcIB-021 of Table B, or fragments or derivatives thereof; or an amino acid sequence having at least 50%, 60%, 70%, 80%, 90%, 91%, 92%, 93%, 94%, 95%, 96%, 97%, 98% or 99% sequence identity therewith;
ii) a PVTD encoded by a nucleic acid sequence selected from a nucleic acid sequence of Table E to G and M to R, or a derivative or fragment thereof;
iii) a PVTD encoded by a nucleic acid sequence having at least 50%, 60%, 70%, 80%, 90%, 91%, 92%, 93%, 94%, 95%, 96%, 97%, 98% or 99% sequence identity with a nucleic acid sequence of H);
iv) a PVTD encoded by a fragment of a nucleic acid sequence of i) to iii).

[0153] A PVTD may be identified and isolated from a longer sequence provided herein by a person skilled in the art. PVTD sequences are recognisable by having a non-collagen like sequence and by their three dimensional structure. Suitable PVTD's can be determined by their ability to hold collagen or collagen-like sequences in a trimer and preferably triple helical structure, and preferably to mediate one or more of the above mentioned functional characteristics of improved solubility, stability, thermal reversibility and lack of degradation. Preferred PVTD's are the PfN, PfC, Pf2 and PCoil sequences disclosed herein.

[0154] It is envisaged that any of the PVTD's disclosed herein may serve to provide increased thermal stability, increased solubility, improved resistance of fusion polypeptides to degradation, and/or improved reforming after denaturation. Preferably, however, one or more PfC domains may be used to provide thermal stability of a fusion protein and/or thermal reversibility; and one or more PfN and/or PCoil domains may be used to provide improved solubility as defined herein. Preferably, one or more PfC, PfN and/or PCoil sequences are used as capping domains, flanking one or both ends of a eukaryotic collagen or collagen-like domain. More preferably, PCoil sequences are provided within the fusion protein or polypeptide and not flanking an end thereof.

[0155] In the present invention, in a variant or derivative, the substitutions may be conservative substitutions, in which the amino acids or nucleic acids are replaced by amino acids or nucleic acids having similar properties such that the nature and activity of the sequence is not changed. Alternatively, the substitutions may be non-conservative, such that they are replaced by those having different properties which in turn affect the nature and properties of the sequence. Derivatives also include those sequences where one or more amino acids or nucleic acids have been added or deleted. Variants and derivatives also include combinations which have been engineered for a particular purpose and are not seen in nature. The monomers of such variants or derivatives may be naturally occurring or variant. Specific biological effects can be elicited by treatment with a derivative or fragment of limited function. For example, use of a derivative of collagen in a product or in treatment may have preferred biological activity or fewer side effects in a subject relative to treatment with the naturally occurring form of the collagen protein variants or derivatives or fragments of prokaryotic or viral sequences may affect the formation, structure or activity of a fusion protein or polypeptide of the invention.

[0156] “Sequence identity” is expressed as a percentage. The measurement of sequence identity of a nucleotide sequences is a method well known to those skilled in the art, using computer implementated mathematical algorithms such as ALIGN (Version 2.0), GAP, BESTFIT, BLAST (Altschul et al J. Mol. Biol. 215: 403 (1990)), FASTA and TFASTA (Wisconsin Genetic Software Package Version 8, available from Genetics Computer Group, Accelrys Inc. San Diego, Calif.), and CLUSTAL (Higgins et al, Gene 73: 237-244 (1998)), using default parameters.

[0157] Nucleic acid molecules defined herein as having sequence identity with a reference sequence may alternatively be defined as being capable of hybridising under stringent conditions to the complement of the reference sequence. Stringent hybridisation conditions are defined as those conditions under which a nucleotide sequence will preferentially hybridize to a target sequence. Increasing the stringency of the hybridisation conditions enables sequences of higher sequence identity to be found. Typical hybridisation conditions are 30-60° C., pH 7.0 to 8.3 and a salt concentration of less than 1.5 M Na⁺ ions. Preferred stringent hybridisation conditions hybridisation in 1M NaCl, 1% SDS at 37° C., and 50% formamide and washing in 0.1×SSC at 60 to 65° C.

[0158] “Naturally occurring,” as used with reference to the present invention refers to the fact that the object can be found in nature, for example is present in an organism, including viruses, and can be isolated from a source in nature and has not been intentionally modified by humankind in the laboratory. For example, a “naturally occurring” protein or polypeptide is one which exists in the same state as it exists in nature; i.e., it is not isolated, purified, recombinant, or cloned.

[0159] “Isolated” or “purified”, as used with reference to the present invention refers to an object which is substantially free of cellular material or other contaminating proteins from the cell or tissue source from which it is derived, for example enzymes, reagents, non-collagenous materials, telopeptides, prions, viruses, glycoproteins, lipids, and/or telopeptides that may cause disease, inflammatory and/or immunological reactions or substantially free from chemical precursors or other chemicals when chemically synthesized. The language “substantially free of cellular material” includes preparations in which the object is separated from cellular components of the cells from which it is isolated or recombinantly produced. Thus, it may comprise less than about 30%, 20%, 10%, or 5% (by dry weight) of any “contaminating” material. When a protein or polypeptide is recombinantly produced, it is also preferably substantially free of culture medium, i.e., culture medium represents less than about 20%, 10%, or 5% of the volume of the protein preparation. When a protein or polypeptide is produced by chemical synthesis, it is preferably substantially free of chemical precursors or other chemicals, i.e., it is separated from chemical precursors or other chemicals which are involved in the synthesis of the protein. Accordingly such preparations have less than about 30%, 20%, 10%, 5% (by dry weight) of chemical precursors or non-collagen chemicals.

[0160] Any protein or polypeptides used in the present invention, including the collagen, collagen-like and PVTD sequences, may be modified to alter stability, functionality or physiochemical properties. Such modification includes addition of one or more polyethylene glycol molecules, sugars, phosphates, and/or other such molecules, where the molecule or molecules are not naturally attached to the corresponding wild-type polypeptides or proteins. Suitable chemical modifications and methods modifying by chemical synthesis are well known to those of skill in the art. The same type of modification may be present in the same or varying degree at several sites on the protein. Furthermore, modifications can occur anywhere in the sequence, including on the backbone, on any amino acid side-chains and at the amino or carboxyl termini. Accordingly, a given polypeptide or protein may contain one or more of the same or different types of modifications.

[0161] Such variants, derivatives or modified polypeptides or proteins may be structurally substantially similar in both three-dimensional shape and biological activity to a naturally occurring polypeptide or protein and may preferably comprise a spatial arrangement of reactive chemical moieties that closely resembles the three-dimensional arrangement of active groups in the naturally occurring polypeptide or protein. Further modifications can be made by replacing chemical groups of the amino acids with other chemical groups of similar structure. These modifications include incorporating amino acids which are not directly encoded by the universal genetic code, or non-natural amino acids. Amino acids may be incorporated into the polypeptide chain using alternative peptide bond linkages (for example R-amino acids).

[0162] Additionally, a polypeptide or protein used in the present invention, for example the collagen or collagen-like protein or polypeptide or PVTD, may be structurally modified to comprise one or more D-amino acids. For example, the polypeptide or protein may be an enantiomer in which one or more L-amino acid residues in the amino acid sequence is replaced with the corresponding D-amino acid residue or a reverse-D polypeptide, which is a polypeptide consisting of D-amino acids arranged in a reverse order as compared to the L-amino acid sequence described above (Smith et al. (1988), Drug Develop. Res. 15:371-379). Methods of producing suitable structurally modified polypeptides are well known in the art

[0163] Suitable derivatives may be identified by screening combinatorial libraries of mutants, e.g., truncation mutants. Libraries of mutants may be generated using techniques such as combinatorial mutagenesis, enzymatically ligating a mixture of synthetic oligonucleotides into gene sequences such that a degenerate set of potential polypeptide or protein sequences is expressible as individual polypeptides, or alternatively, as a set of larger fusion proteins (e.g., for phage display). There are a variety of methods which can be used to produce libraries of potential collagen derivatives from a degenerate oligonucleotide sequence. Chemical synthesis of a degenerate gene sequence can be performed in an automatic DNA synthesiser, and the synthetic gene then ligated into an appropriate expression vector. Use of a degenerate set of genes allows for the provision, in one mixture, of all of the sequences encoding the desired set of potential sequences. Methods for synthesizing degenerate oligonucleotides are known in the art (see, e.g., Narang (1983), Tetrahedron 39:3-22; Itakura et al. (1984), Ann. Rev. Biochem. 53:323-356; Itakura et al. (1977), Science 198:1056-1063; Ike et al. (1983), Nucleic Acids Res. 11:477-488).

[0164] By “operably linked” means that domains and/or sequences within a fusion polypeptide or protein are linked in a manner which allows some or all of the biological activity of one or more of the sequences to be retained. The same definition is used herein with reference to the nucleic acid sequences and expression vectors of the invention. As an example, in relation to polypeptide sequences, where two or more are operably linked, each may retain some or all of its biological activity. Where two or more nucleic acid sequences are operably linked, this may mean that they are positioned in relation to each other such that one may direct transcription of the other, in the presence of any necessary molecules such as transcription factors.

[0165] The present invention also provides a nucleic acid sequence encoding a fusion protein or polypeptide of the invention. Typically, the nucleic acid sequence will encode a eukaryotic collagen or collagen-like domain comprising, or flanked at one or both ends, by one or more PVTDs, as previously described herein.

[0166] The fusion polypeptides of the fusion protein may be encoded by a single nucleic acid sequence or a plurality (two, three, four, five, six, seven, eight, nine, or ten or more) nucleic acid sequences. A plurality of nucleic acid sequences may be operably linked. The fusion protein may be encoded by a single nucleic acid sequence or two or more nucleic acid sequences, which may or may not be operably linked.

[0167] Nucleic acid sequences encoding the PVTDs as described herein include:

i) a nucleic acid sequence which encodes an amino acid sequence of any one of EPcIA-001 to EPcIA-142 of Table A, EPcIB-001 to EPcIB-021 of Table B, EPcIC-001 to EPcIC-005 of Table C, or EPcID-001 of Table D, PfN-01 to PfN-86 of Table H, PCoil-01 to PCoil-46 of Table I, PfC-01 to PfC-61 of Table J, and a Pf2 sequence, preferably one of the Pf2 domains in sequences EPcIB-001 to EPcIB-021 of Table B; or a nucleic acid sequence encoding an amino acid sequence having at least 50%, 60%, 70%, 80%, 90%, 91%, 92%, 93%, 94%, 95%, 96%, 97%, 98% or 99% sequence identity therewith;
ii) a nucleic acid sequence selected from a nucleic acid sequence of Table E to G and M to R, or a nucleic acid sequence having at least 50%, 60%, 70%, 80%, 90%, 91%, 92%, 93%, 94%, 95%, 96%, 97%, 98% or 99% sequence identity therewith;
iii) a fragment or derivative of a nucleic acid sequence of i) to iii) which encodes a polypeptide which functions as a PVTD.

[0168] Nucleic acid sequences encoding the eukaryotic collagen or collagen like domains as described herein include:

i) a nucleic acid sequence which encodes an amino acid sequence of any one of hCol01-089 of Table K and L; or a nucleic acid sequence which encodes an amino acid sequence having at least 50%, 60%, 70%, 80%, 90%, 91%, 92%, 93%, 94%, 95%, 96%, 97%, 98% or 99% sequence identity therewith;
ii) a nucleic acid sequence selected from a nucleic acid sequence of Table S to V, or a nucleic acid sequence having at least 50%, 60%, 70%, 80%, 90%, 91%, 92%, 93%, 94%, 95%, 96%, 97%, 98% or 99% sequence identity therewith;
iii) a fragment or derivative of a nucleic acid sequence of i) to iii), which encodes a collagen or collagen-like domain.

[0169] Preferably, the eukaryotic and prokaryotic domains and sequences of a fusion polypeptide or protein will be encoded as a contiguous sequence, such that they are operably linked.

[0170] Each trimeric fusion protein of the invention will be the result of trimerisation of three monomer fusion proteins of the invention, which can be identical or different and therefore encoded by the same or different nucleic acid sequences. Preferably, where two or more nucleic acid sequences encoding fusion polypeptides are provided, they are such that when expressed together they are able to cooperate (with one or more other fusion polypeptides) to form a triple helix. Preferably, PVTDs that flank one or both ends of the collagen or collagen-like domains are selected such that they are able to cooperate with PVTDs of other monomers to form trimers, and thus mediate the formation of collagen triple helices.

[0171] Nucleic acid sequences encoding sequences described herein may be obtained by screening cDNA libraries (e.g., libraries generated by recombining homologous nucleic acids as in typical recursive recombination methods) using oligonucleotide probes which can hybridize to, or PCR-amplify, polynucleotides which encode known sequences or preferred motifs. Procedures for screening and isolating cDNA clones are well-known to those of skill in the art. Such techniques are described in, for example, Molecular cloning: a laboratory manual, 3rd edition (2001), by J. Sambrook & D. Russell, Cold Spring Harbor Laboratory Press, Cold Spring Harbor, N.Y. (“Sambrook & Russell”), and Current Protocols in Molecular Biology (2010, regularly supplemented since 1987, last update Jan. 25, 2010), F. M. Ausubel et al. editors, Wiley Interscience (“Ausubel”). Alternatively, nucleic acid sequences including designed sequences not found in nature can be synthesized by conventional techniques including automated DNA synthesizers. Synthesis of genes of almost any length is available commercially from several providers and is a well-known technique to those of skill in the art.

[0172] To provide the eukaryotic collagen polypeptides with the appropriate signal and secretion peptides, a nucleic acid sequence encoding a polypeptide may additionally comprise nucleic acid sequences encoding signal and/or secretion peptides, in addition to any further sequences which are required for post-translational processing or transport of the fusion protein or polypeptide. Preferably, nucleic acid sequences encoding the peptides will be operably linked to the nucleic acid sequence encoding the fusion protein or polypeptide. Preferably, the nucleic acid sequences will be provided as a contiguous sequence encoding a fusion protein or polypeptide and signal and/or secretion peptides as a single polypeptide sequence.

[0173] Variant nucleic acid sequences can be created by introducing one or more nucleotide substitutions, additions or deletions into the naturally occurring nucleotide sequence such that one or more amino acid substitutions, additions or deletions are introduced into the encoded protein. Mutations can be introduced by standard techniques, such as site-directed mutagenesis and PCR-mediated mutagenesis and nucleic acid synthesis. Preferably, conservative amino acid substitutions are made at one or more predicted non-essential amino acid residues. Thus, for example, 1%, 2%, 3%, 5%, or 10% of the amino acids can be replaced by conservative substitution. A “conservative amino acid substitution” is one in which the amino acid residue is replaced with an amino acid residue having a similar side chain. Families of amino acid residues having similar side chains have been defined in the art. These families include amino acids with basic side chains (e.g., lysine, arginine, histidine), acidic side chains (e.g., aspartic acid, glutamic acid), uncharged polar side chains (e.g., glycine, asparagine, glutamine, serine, threonine, tyrosine, cysteine), non-polar side chains (e.g., alanine, valine, leucine, isoleucine, proline, phenylalanine, methionine, tryptophan), beta-branched side chains (e.g., threonine, valine, isoleucine) and aromatic side chains (e.g., tyrosine, phenylalanine, tryptophan, histidine). Thus, a predicted non-essential amino acid residue is preferably replaced with another amino acid residue from the same side chain family. Alternatively, mutations can be introduced randomly along all or part of a collagen coding sequence, such as by saturation mutagenesis, and the resultant mutants can be screened for biological activity to identify mutants that retain activity. Following mutagenesis, the encoded protein can be expressed recombinantly and the activity of the protein can be determined.

[0174] Preferably, a nucleic acid sequence of the fifth aspect of the invention protein is produced by standard recombination DNA techniques. For example, DNA sequences coding for the different domains are ligated together in-frame in accordance with conventional techniques, for example by employing blunt-ended or stagger-ended termini for ligation, restriction enzyme digestion to provide for appropriate termini, filling-in of cohesive ends as appropriate, alkaline phosphatase treatment to avoid undesirable joining, and enzymatic ligation. In another embodiment, the nucleic acid sequence of the invention may be synthesized by conventional techniques including automated DNA synthesizers. Alternatively, PCR amplification of gene fragments can be carried out using anchor primers which give rise to complementary overhangs between two consecutive gene fragments which can subsequently be annealed and re-amplified to generate a chimeric gene sequence (see for example Current Protocols in Molecular Biology (2010, regularly supplemented since 1987, last update Jan. 25, 2010), F. M. Ausubel et al. editors, Wiley Interscience).

[0175] In embodiments, nucleic acid sequences of the invention can be modified at the base moiety, sugar moiety or phosphate backbone to improve, e.g., the stability, hybridization, or solubility of the molecule. For example, the deoxyribose phosphate backbone of the nucleic acids can be modified to generate peptide nucleic acids ((see Hyrup & Nielsen (1996), Bioorg. Med. Chem. 4:5-23). As used herein, the terms “peptide nucleic acids” or “PNAs” refer to nucleic acid mimics, e.g., DNA mimics, in which the deoxyribose phosphate backbone is replaced by a pseudopeptide backbone and only the four natural nucleobases are retained. The neutral backbone of PNAs has been shown to allow for specific hybridization to DNA and RNA under conditions of low ionic strength. The synthesis of PNA oligomers can be performed using standard solid phase peptide synthesis protocols as described in Hyrup et al. (1996) supra; Perry-O'Keefe et al. (1996), Proc. Natl. Acad. Sci. USA 93:14670-675.

[0176] In the present invention, a “recombinant nucleic acid” (e.g., DNA or RNA) molecule or sequence means, for example, a nucleic acid sequence that is not naturally occurring or is made by the combination (for example, artificial combination) of at least two segments of sequence that are not typically included together, not typically associated with one another, or are otherwise typically separated from one another. A recombinant nucleic acid sequence can comprise a nucleic acid molecule formed by the joining together or combination of nucleic acid segments from different sources and/or artificially synthesized. The term “recombinantly produced” refers to an artificial combination usually accomplished by either chemical synthesis means, recursive sequence recombination of nucleic acid segments or other diversity generation methods of nucleotides, or manipulation of isolated segments of nucleic acids, e.g., by genetic engineering techniques known to those of ordinary skill in the art. “Recombinantly expressed” typically refers to techniques for the production of a recombinant nucleic acid in vitro and transfer of the recombinant nucleic acid into cells in vivo, in vitro, or ex vivo where it may be expressed or propagated. A “recombinant polypeptide” or “recombinant protein” usually refers to polypeptide or protein, respectively, that results from a cloned or recombinant gene or nucleic acid.

[0177] A nucleic acid sequence or polypeptide is “recombinant” when it is artificial or engineered, or derived from an artificial or engineered protein or nucleic acid. The term “recombinant” when used with reference e.g., to a cell, nucleic acid sequence, expression vector, or polypeptide typically indicates that the cell, nucleic acid sequence, or expression vector has been modified by the introduction of a heterologous (or foreign) nucleic acid or the alteration of a native nucleic acid, or that the polypeptide has been modified by the introduction of a heterologous amino acid, or that the cell is derived from a cell so modified. Recombinant cells express nucleic acid sequences (e.g., genes) that are not found in the native (non-recombinant) form of the cell or express native nucleic acid sequences (e.g., genes) that would be abnormally expressed, under-expressed, or not expressed at acid.

[0178] The present invention also provides a vector comprising a nucleic acid sequence of the invention. Preferably, the vector will comprise one, two or three nucleic acid sequences of the invention, which when expressed may cooperate to form a trimeric, preferably a triple-helical, protein where the triple helical domains form a correct collagen or collagen-like helix. Preferably, the vector is an expression vector. Alternatively, it is envisaged that a plurality of vectors may be used to express a fusion polypeptide or fusion protein of the invention. In this embodiment, two, three, four, five, or six or more vectors may be used, each encoding all or part of a fusion polypeptide or fusion protein, which when expressed operably cooperate to form a polypeptide chain, fusion polypeptide or fusion protein of the invention.

[0179] A vector is a composition for facilitating cell transduction by a selected nucleic acid, or expression of the nucleic acid in the cell. Vectors include, e.g., plasmids, cosmids, viruses, YACs, BACs, bacteria, poly-lysine, etc. An “expression vector” is a nucleic acid construct, generated recombinantly or synthetically, with a series of specific nucleic acid elements that permit transcription of a particular nucleic acid sequence in a host cell. The vector can be part of a plasmid, virus, or nucleic acid fragment. In a preferred aspect of this embodiment, the construct further comprises regulatory sequences, including, for example, a promoter, operably linked to the sequence. Large numbers of suitable vectors and promoters are known to those of skill in the art, and are commercially available.

[0180] General texts which describe molecular biological techniques useful herein, including the use of vectors, promoters and many other relevant topics, include Guide to Molecular Cloning Techniques, Methods in Enzymology, 152 (1987), S. L. Berger & A. R. Kimmel eds, Academic Press, San Diego, Calif. (“Berger & Kimmel”); Sambrook & Russell, supra, and Ausubel, supra.

[0181] Certain vectors are capable of autonomous replication in a host cell into which they are introduced (e.g., bacterial vectors having a bacterial origin of replication and episomal mammalian vectors). Other vectors (e.g., non-episomal mammalian vectors) are integrated into the genome of a host cell upon introduction into the host cell, and thereby are replicated along with the host genome. Moreover, expression vectors, are capable of directing the expression of genes to which they are operatively linked. In general, expression vectors of utility in recombinant DNA techniques are often in the form of plasmids (vectors). However, the invention is intended to include such other forms of expression vectors, such as viral vectors (e.g., replication defective retroviruses, adenoviruses and adeno-associated viruses), which serve equivalent functions.

[0182] The vectors of the invention may comprise a nucleic acid sequence of the invention in a form suitable for expression of the nucleic acid in a host cell, which means that the vectors include one or more regulatory sequences, selected on the basis of the host cells to be used for expression, which is operatively linked to the nucleic acid sequence to be expressed. Within a vector, “operably linked” is intended to mean that the nucleotide sequence of interest is linked to the regulatory sequence(s) in a manner which allows for expression of the nucleotide sequence (e.g., in an in vitro transcription/translation system or in a host cell when the vector is introduced into the host cell). The term “regulatory sequence” is intended to include promoters, enhancers and other expression control elements (e.g., polyadenylation signals). Such regulatory sequences are described, for example, in Gene Expression Technology, Methods in Enzymology, 185 (1990), D. V. Goeddel, editor, Academic Press, San Diego, Calif. Regulatory sequences include those which direct constitutive expression of a nucleotide sequence in many types of host cell and those which direct expression of the nucleotide sequence only in certain host cells (e.g., tissue-specific regulatory sequences). It will be appreciated by those skilled in the art that the design of the vector can depend on such factors as the choice of the host cell to be transformed, the level of expression of protein desired, etc. The vectors of the invention can be introduced into host cells to thereby produce proteins or polypeptides, including fusion proteins or polypeptides, encoded by nucleic acids as described herein.

[0183] The vectors of the invention can be designed for expression of the fusion protein or polypeptide of the invention in prokaryotic or eukaryotic cells, preferably the former. Most preferably, the fusion protein or polypeptide is expressed in bacterial cells, and most preferably the same species of cells from which the prokaryotic collagen trimerisation domains are derived from e.g., bacterial cells such as E. coli. Alternatively the fusion protein may be expressed in other host cell types such as yeast, insect, mammalian, fish or plant. The vector may be designed for in vitro or ex vivo expression.

[0184] Expression of proteins in prokaryotes is most often carried out in E. coli with vectors containing constitutive or inducible promoters directing the expression of either fusion or non-fusion proteins. Fusion vectors add a number of amino acids to a protein encoded therein, usually to the amino terminus of the recombinant protein. Such fusion vectors typically serve three purposes: 1) to increase expression of recombinant protein; 2) to increase the solubility of the recombinant protein; and 3) to aid in the purification of the recombinant protein by acting as a ligand in affinity purification. Often, in fusion expression vectors, a proteolytic cleavage site is introduced at the junction of the fusion moiety and the recombinant protein to enable separation of the recombinant protein from the fusion moiety subsequent to purification of the fusion protein. Such enzymes, and their cognate recognition sequences, include Factor Xa, thrombin, TEV protease and enterokinase. Typical fusion expression vectors include pGEX (Pharmacia Biotech Inc; Smith & Johnson (1988) Gene 67:31-40), pMAL (New England Biolabs, Beverly, Mass.) and pRIT5 (Pharmacia, Piscataway, N.J.) which fuse glutathione S-transferase (GST), maltose E binding protein, or protein A, respectively, to the target recombinant protein.

[0185] Examples of suitable inducible non-fusion E. coli expression vectors include pTrc (Amann et al. (1988) Gene 69:301-315) and pET 11d (Studier et al. (1990), in Gene Expression Technology, Methods in Enzymology 185, D. V. Goeddel, ed, Academic Press, San Diego, Calif., pp. 60-89). Target gene expression from the pTrc vector relies on host RNA polymerase transcription from a hybrid trp-lac fusion promoter. Target gene expression from the pET 11d vector relies on transcription from a T7 gn10-lac fusion promoter mediated by a coexpressed viral RNA polymerase (T7 gn1). This viral polymerase is supplied by host strains BL21(DE3) or HMS174(DE3) from a resident prophage harboring a T7 gn1 gene under the transcriptional control of the lacUV5 promoter.

[0186] One strategy to maximize recombinant protein expression in E. coli is to express the protein in a bacterial strain having an impaired capacity to proteolytically cleave the recombinant protein (Gottesman, Gene Expression Technology: Methods in Enzymology 185, Academic Press, San Diego, Calif. (1990) 119-128). Another strategy is to alter the nucleic acid sequence of the nucleic acid to be inserted into an expression vector so that the individual codons for each amino acid are those preferentially utilized in E. coli (Wada et al. (1992) Nucleic Acids Res. 20:2111-2118). Such alteration of nucleic acid sequences of the invention can be carried out by standard DNA synthesis techniques.

[0187] In a further aspect, the present invention provides a host cell comprising any one or more of the above described fusion protein, nucleic acid sequence or vector. The host cell can be a eukaryotic cell, such as a plant cell, an insect cell, a mammalian cell (such as Chinese hamster ovary cells (CHO) or COS cells), a yeast cell, or the host cell can be a prokaryotic cell, such as a bacterial cell (e.g., an E. coli cell). Most preferably, the host cell will be a bacterial cell. Preferably, the host cell will be of the same species as that from which the prokaryotic collagen trimerisation domains are derived, examples of which include E. coli, Streptococcus and Bacillus. Suitable host cells will be known to persons skilled in the art.

[0188] Different host cells have specific cellular machinery and characteristic mechanisms for such post-translational activities and can be chosen to ensure the correct modification and processing of the introduced protein.

[0189] The terms “host cell” and “recombinant host cell” are used interchangeably herein. Such terms refer not only to the particular subject cell, but also to the progeny or potential progeny of such a cell. Because certain modifications may occur in succeeding generations due to either mutation or environmental influences, such progeny may not, in fact, be identical to the parent cell, but are still included within the scope of the term as used herein.

[0190] For long-term, high-yield production of the fusion proteins or polypeptides, cell lines may be established, which stably express a fusion protein of the invention. The cells are transduced using the vectors of the invention, which contain viral origins of replication or endogenous expression elements and a selectable marker gene. Following the introduction of the vector into the cells, they are allowed to grow for 1-2 days in an enriched media before they are switched to selective media. The purpose of the selectable marker is to confer resistance to selection, and its presence allows growth and recovery of cells which successfully express the introduced sequences. For example, resistant clumps of stably transformed cells can be proliferated using tissue culture techniques appropriate to the cell type.

[0191] For stable transfection of mammalian cells, it is known that, depending upon the vector and transfection technique used, only a small fraction of cells may integrate the foreign DNA into their genome. In some cases vector DNA is retained by the host cell. In other cases the host cell does not retain vector DNA and retains only an isolated nucleic acid molecule of the invention carried by the vector. In some cases, and isolated nucleic acid sequence of the invention is used to transform a cell without the use of a vector.

[0192] Preferred selectable markers include those which confer resistance to drugs, such as G418, hygromycin and methotrexate. Nucleic acid encoding a selectable marker can be introduced into a host cell on the same vector as the nucleic acid encoding the fusion protein, or can be introduced on a separate vector. Cells stably transfected with the introduced nucleic acid can be identified by drug selection (e.g., cells that have incorporated the selectable marker gene will survive, while the other cells die).

[0193] The present invention also provides an extract from a host cell, which comprises any one or more of the fusion polypeptide or protein, nucleic acid sequence and/or vector of the invention. The extract may be a cellular lysate.

[0194] The fusion proteins, polypeptides, nucleic acid sequences, vectors and/or host cells of the invention can also be used to produce non-human transgenic animals. The fusion proteins of the invention, and the nucleic acid sequences coding for fusion proteins of the invention, can also be used to produce non-human transgenic animals through application of the appropriate technology. Thus, the present invention provides a non-human, insect or animal comprising a host cell of the invention.

[0195] A host cell of the invention, such as a prokaryotic or eukaryotic host cell in culture, can be used to produce (i.e., express) a fusion protein or polypeptide of the invention. Accordingly, the invention further provides a method of producing a fusion protein or polypeptide comprising a eukaryotic collagen or collagen-like domain and one or more PVTDs, the method comprising:

i) introducing into a host cell one or more nucleic acid sequences encoding a eukaryotic collagen or collagen-like domain comprising, or flanked by, one or more PVTDs;
ii) culturing the host cell under conditions suitable for expression and formation of the fusion polypeptide or protein in the host cell, and preferably the formation of a trimeric assembly of the fusion protein; and
iii) isolating the expressed fusion protein or polypeptide from the host cell.

[0196] Preferably, the nucleic acid sequence is that of the fifth aspect. The nucleic acid sequence may be provided in the host cell as a vector of the fourth aspect.

[0197] Introduction of the construct into the host cell can be effected by calcium phosphate transfection, DEAE-Dextran mediated transfection, electroporation, or other common techniques (Davis, L., Dibner, M., and Battey, I. (1986) Basic Methods in Molecular Biology, Sambrook and Ausubel, supra.).

[0198] Host cells transformed with a nucleic acid sequence of the invention are optionally cultured under conditions suitable for the expression and recovery of the encoded protein from cell culture. The fusion protein or polypeptide produced by a recombinant cell can be secreted, membrane-bound, or contained intracellularly, depending on the sequence and/or the vector used. As will be understood by those of skill in the art, vectors containing nucleic acid sequences encoding fusion proteins or polypeptide of the invention can be designed with signal sequences which direct secretion of the polypeptides through a prokaryotic or eukaryotic cell membrane.

[0199] The engineered host cells can be cultured in conventional nutrient media modified as appropriate for activating promoters, selecting transformants, or amplifying the nucleic acid sequences and/or expression vector. The culture conditions, such as temperature, pH and the like, will be apparent to those skilled in the art. In addition to Sambrook & Russell, Berger & Kimmel and Ausubel, details regarding cell culture can be found in Payne et al. (1992) Plant Cell and Tissue Culture in Liquid Systems, John Wiley & Sons, New York, N.Y.; Gamborg and Phillips (eds.) (1995) Plant Cell, Tissue and Organ Culture, Fundamental Methods Springer Lab Manual, Springer-Verlag (Berlin Heidelberg, N.Y.); and Atlas and Parks (eds.) The Handbook of Microbiological Media (1993) CRC Press, Boca Raton, Fla.

[0200] Cell-free transcription/translation systems can also be employed to produce the fusion proteins or polypeptides, using the nucleic acid sequences and/or expression vectors of the present invention. Methods will be known to persons skilled in the art, and are detailed in Tymms (1995) In vitro Transcription and Translation Protocols: Methods in Molecular Biology Volume 37, Garland Publishing, NY.

[0201] Following transduction of a suitable host cell line or strain and growth of the host strain to an appropriate cell density, the selected promoter is induced by appropriate means (e.g., temperature shift or chemical induction) and cells are cultured for an additional period. The fusion protein is then recovered from the culture medium. Alternatively, cells can be harvested by centrifugation, disrupted by physical or chemical means, and the resulting crude extract retained for further purification. Eukaryotic or prokaryotic cells employed in expression of proteins can be disrupted by any convenient method, including freeze-thaw cycling, sonication, mechanical disruption, or by the use of cell lysing agents, or other methods, which are well know to those skilled in the art.

[0202] Preferably, the method may further comprise downstream processing of the fusion polypeptide or protein.

[0203] The nucleic acid sequences of the present invention may be operably linked to a marker sequence which facilitates purification of the encoded protein. Such purification facilitating domains include, but are not limited to, metal chelating peptides such as poly-histidine modules that allow purification on immobilized metals, a sequence which binds glutathione (e.g., GST), a hemagglutinin (HA) tag (corresponding to an epitope derived from the influenza hemagglutinin protein (Wilson et al. (1984) Cell 37:767-778), maltose binding protein sequences, and/or the FLAG epitope utilized in the FLAGS extension/affinity purification system (Immunex Corp, Seattle, Wash.). The inclusion of a protease-cleavable polypeptide linker sequence between the purification domain and the nucleic acid sequence of the invention is useful to facilitate purification. In a preferred embodiment the fusion polypeptide or protein will be expressed using a vector containing a poly-histidine tag at the N-terminus, or at the C-terminus, or both, to facilitate purification using immobilized metal affinity chromatography. In another preferred embodiment the fusion polypeptide or protein will be expressed using a vector containing a poly-histidine tag at the N-terminus, or at the C-terminus, or both, in addition to one or more solubility enhancer domains in frame to the fusion protein to facilitate its soluble expression in bacterial expression systems. Examples of suitable solubility enhancer domains include but are not limited to GST, maltose binding protein (MBP) (Sachdev & Chirgwin (2000), Methods Enzymol. 326:312-321), N utilization substance A (NusA) (Nallamsetty & Waugh (2006), Protein Expr. Purif. 45:175-182, domain I of IF2 (Sarensen et al. (2003) Protein Expr. Purif. 32:252-259) or thioredoxin (Trx) (Sachdev & Chirgwin (1998) Protein Expr. Purif. 12:122-132).

[0204] In some aspects, it may be desirable to denature the expressed and purified fusion protein to provide a gelatine-like protein. A gelatine-like protein of the invention includes denatured collagen or collagen like proteins or collagen or collagen like fragments or mixtures thereof. Thus, a gelatine made in the present invention may comprise monomers or dimers of the fusion protein optionally in combination with fragments of the fusion protein or fusion polypeptide. In the context of the present invention, any degree of denaturing is envisaged, which may be complete or partial loss of the tertiary structure of the fusion protein, and/or complete or partial uncoiling of the triple helix.

[0205] The denaturing may be the eukaryotic portion of the fusion protein, or may additionally comprise denaturing of the one or more PVTDs present.

[0206] Gelatines from animal origin are denatured forms of type I collagens from animal skins, bones and hides. Thus, it contains polypeptide sequences having Gly-X-Y repeats, where X and Y are most often proline and hydroxyproline residues. These sequences contribute to triple helical structure and affect the gelling ability of gelatine polypeptides. However, it is also possible to manufacture unhydroxylated gelatine from collagens produced in the absence of prolyl hydroxylation (see for example U.S. Pat. No. 6,413,742).

[0207] Collagen can be denatured to produce gelatin utilizing detergents, heat or denaturing agents. Additionally, these methods, processes, and techniques include, but are not limited to, treatments with strong alkali or strong acids, heat extraction in aqueous solution, ion exchange chromatography, cross-flow filtration and heat drying, and other methods that may be applied to collagen to produce the gelatine.

[0208] The expressed protein can be recovered and purified from recombinant cell cultures by any of a number of methods well known in the art, including ammonium sulfate or ethanol precipitation, acid extraction, anion or cation exchange chromatography, size exclusion chromatography, hydrophobic interaction chromatography, affinity chromatography (e.g., using any of the tagging systems noted herein), hydroxyapatite chromatography, and lectin chromatography. Protein refolding steps can be used, as desired, in completing configuration of the mature protein. Fast protein liquid chromatography (FPLC) and High performance liquid chromatography (HPLC) can be employed if appropriate in any of the purification steps.

[0209] A nucleic acid, polypeptide, or other component is substantially pure when it is partially or completely recovered or separated from other components of its natural environment such that it is the predominant species present in a composition, mixture, or collection of components (i.e., on a molar basis it is more abundant than any other individual species in the composition). In preferred embodiments, the preparation consists of more than 70%, typically more than 80%, or preferably more than 90% of the isolated species.

[0210] In an eighth aspect of the invention, there is provided a product comprising any one or more of a fusion polypeptide or protein, nucleic acid sequence, expression vector and/or host cell of the invention. Products include compositions, foodstuffs, cosmetic, medicament, artificial tissue, pharmaceutical, dietary supplement, reagent and glue.

[0211] Where the product is a composition, this may be made by admixing any one or more of the fusion proteins, nucleic acid sequences, expression vectors and/or host cells of the present invention with one or more optional excipients and other optional ingredients. Examples of suitable excipients include, but are not limited to any of the vehicles, carriers, buffers and stabilizers that are well known in the art.

[0212] Where the composition is a pharmaceutical composition, the composition may contain, in addition to any one or more of the fusion polypeptides, proteins, nucleic acid sequences, expression vectors and/or host cells of the present invention, one or more further pharmaceutically active agents, wherein the resulting combination composition may be further admixed with an excipient. Pharmaceutically acceptable excipients are well known in the art, and disclosed in, for example, Handbook of Pharmaceutical Excipients, (Fifth Edition, October 2005, Pharmaceutical Press, Eds. Rowe R C, Sheskey P J and Weller P). “Pharmaceutically acceptable carrier” is intended to include any and all solvents, dispersion media, coatings, antibacterial and antifungal agents, isotonic and absorption delaying agents, and the like, compatible with pharmaceutical administration. The use of such media and agents for pharmaceutically active substances is well known in the art. Except insofar as any conventional media or agent is incompatible with the active compound, use thereof in the compositions is contemplated. Suitable further pharmaceutically active agents include, but are not limited to, hemostatics (such as thrombin, fibrinogen, ADP, ATP, calcium, magnesium, TXA2, serotonin, epinephrine, platelet factor 4, factor V, factor XI, PAI-1, thrombospondin and the like and combinations thereof), anti-infectives (such as antibodies, antigens, antibiotics, antiviral agents and the like and combinations thereof), analgesics and analgesic combinations or, anti-inflammatory agents (such as antihistamines).

[0213] Preferably, the composition may additionally comprise a surfactant (or with another component of a cleaning solution such as a builder, a polymer, a bleach system, a structurant, a pH adjuster, a humectant, or a neutral inorganic salt) and/or an excipient (optionally a pharmaceutically acceptable excipient), such as starch or lactose, a disintegrating agent such as alginic acid, Primogel, or corn starch; a lubricant such as magnesium stearate or Sterotes; a glidant such as colloidal silicon dioxide; a sweetening agent such as sucrose or saccharin; or a flavoring agent such as peppermint, methyl salicylate, or orange flavoring.

[0214] The active ingredients of the composition, for example any one or more of the fusion polypeptides or proteins, nucleic acid sequences, expression vectors and/or host cells of the present invention and any secondary pharmaceutically active agent are preferably present in the composition in an effective amount. An “effective amount” means a dosage or amount sufficient to produce a desired result. The desired result may comprise an objective or subjective improvement in the recipient which receives the dosage or amount.

[0215] A composition of the invention is formulated to be compatible with its intended route of administration. Examples of routes of administration include parenteral, e.g., intravenous, intradermal, subcutaneous, oral (e.g., inhalation), transdermal (topical), transmucosal, and rectal administration. Solutions or suspensions used for parenteral, intradermal, or subcutaneous application can include the following components: a sterile diluent such as water for injection, saline solution, fixed oils, polyethylene glycols, glycerine, propylene glycol or other synthetic solvents; antibacterial agents such as benzyl alcohol or methyl parabens; antioxidants such as ascorbic acid or sodium bisulfite; chelating agents such as thylenediaminetetraacetic acid; buffers such as acetates, citrates or phosphates and agents for the adjustment of tonicity such as sodium chloride or dextrose. The pH can be adjusted with acids or bases, such as hydrochloric acid or sodium hydroxide. The parenteral preparation can be enclosed in ampoules, disposable syringes or multiple dose vials made of glass or plastic.

[0216] In one embodiment, the active compounds are prepared with carriers that will protect the compound against rapid elimination from the body, such as a controlled release formulation, including implants and microencapsulated delivery systems. Biodegradable, biocompatible polymers can be used, such as ethylene vinyl acetate, polyanhydrides, polyglycolic acid, collagen, polyorthoesters, and polylactic acid. Methods for preparation of such formulations will be apparent to those skilled in the art. The materials can also be obtained commercially from Alza Corporation and Nova Pharmaceuticals, Inc. Liposomal suspensions (including liposomes targeted to infected cells with monoclonal antibodies to viral antigens) can also be used as pharmaceutically acceptable carriers. These can be prepared according to methods known to those skilled in the art, for example, as described in U.S. Pat. No. 4,522,811.

[0217] The nucleic acid molecules of the invention can be inserted into vectors and used as gene therapy vectors. Gene therapy vectors can be delivered to a subject by, for example, intravenous injection, local administration (U.S. Pat. No. 5,328,470) or by stereotactic injection (see, e.g., Chen et al. (1994) Proc. Natl. Acad. Sci. USA 91:3054-3057). The pharmaceutical preparation of the gene therapy vector can include the gene therapy vector in an acceptable diluent, or can comprise a slow release matrix in which the gene delivery vehicle is imbedded. Alternatively, where the complete gene delivery vector can be produced intact from recombinant cells, e.g. retroviral vectors, the pharmaceutical preparation can include one or more cells which produce the gene delivery system.

[0218] Such a pharmaceutical composition may be used for various purposes, including but not limited to diagnostic, therapeutic and/or preventative purposes.

[0219] The composition may be provided in a kit, e.g. sealed in a suitable container that protects the contents from the external environment. Such a kit may include instructions for use. The kit may additionally comprise other compositions, which may be administered substantially simultaneously or sequentially with a pharmaceutical composition of the present invention.

[0220] In an eleventh aspect of the invention, there is provided the use of any one or more of a fusion polypeptide or protein, nucleic acid sequence, vector, gelatine-like protein or host cell of the invention in the treatment or prevention of a condition selected from the group consisting of osteoarthritis, dystrophic epidermolysis bullosa, urinary incontinence disorders, dental and skeletal injuries, in the treatment and healing of wounds and burns, in the manufacture of haemostatic sponges and sutures used by surgeons, in cartilage regeneration, in vascular graft coatings, and in several plastic surgery applications (tissue augmentation, implants and dermal fillings).

[0221] The composition may be administered alone or in combination with other treatments, either substantially simultaneously or sequentially dependent upon the condition to be treated.

[0222] Any one or more of the fusion polypeptide, protein, nucleic acid sequence, vector, gelatine-like protein or host cells of the invention may be useful in the treatment or prevention of connective tissue malfunction or damage, wherein the subject is administered one of the above mentioned products of the invention in an amount effect to treat the condition/disease/disorder, including wherein the subject is a mammal (e.g., a human), and wherein the product of the invention is administered in vivo, in vitro, or ex vivo (or a combination of such) to one or more cells of the subject. An effective amount is as defined above. Conditions which may benefit from treatment with collagen based products of the invention include plastic surgery, dermatology, and/or amputee stump revision, osteogenesis imperfecta, Ehlers-Danlos Syndrome, Infantaile cortical hyperostosis, collagenopathy (types II and XI), Alport syndrome, Goodpastures syndrome, Ulrich myopathy, Bethlem myopathy, epidermolysis bullosa dystrophica, posterior polymorphous corneal dystrophy 2, EDM2 and EDM3, schmid metaphyseal dysplasia, bullus pemphigoid and junctional epidermylosis bullosaa, and atopic dermatitis.

[0223] Treatment may be administered to a subject who displays symptoms or signs of pathology, disease, or disorder, in which treatment is administered to such subject for the purpose of diminishing or eliminating those signs or symptoms of pathology, disease, or disorder. The therapeutic activity of the products of the invention may eliminate or diminish signs or symptoms of pathology, disease or disorder, when administered to a subject suffering from such signs or symptoms.

[0224] In a further aspect of the invention, there is provided a collagen-based product, for example a foodstuff, cosmetic, medical device, medicament, artificial tissue, scaffold, pharmaceutical, dietary supplement, chemical or biochemical reagent or glue, comprising any one or more of fusion polypeptide, protein, nucleic acid sequence, vector, gelatin-like protein or host cell according to the invention.

[0225] In a tenth aspect of the invention, there is provided the use of any one or more of a fusion polypeptide, protein, nucleic acid sequence, vector, gelatin-like protein or host cell of the invention, in a collagen-based product, for example a foodstuff, cosmetic, medical device, medicament, artificial tissue, scaffold, pharmaceutical, dietary supplement, chemical or biochemical reagent or glue.

[0226] Collagen-based products include any product which requires collagen, and is not limited to the products listed above.

[0227] A product of the invention may be a foodstuff, comprising any one or more of a fusion polypeptide, protein, nucleic acid sequence, vector, gelatin-like protein or host cell of the invention, or a denatured gelatin-like protein of the invention. In preferred embodiments, the foodstuff comprises any one or more of a fusion polypeptide, protein or a denatured gelatin-like protein of the invention. The foodstuff may additionally comprise flavourings, preservatives, colouring agents, thickening agents, gelling agents, and any other suitable additives for use in nutritional products. Examples of foodstuffs include emulsifying agents, foam stabilizer, or a thickening agent. Preferred foodstuffs include sweets, gelatin powder, protein drinks, energy bars, wine, beer, fruit juice, food colouring agents and dried food products. The foodstuff may be one which is suitable for human or animal consumption.

[0228] Collagen is widely used in cosmetics, and a product of in the present invention may be cosmetic which comprises any one or more of a fusion polypeptide, fusion protein, nucleic acid sequence, vector, host cell, or a denatured gelatine-like fusion protein of the invention. Preferably, the cosmetic will include a fusion protein of the invention, or a denatured gelatin-like protein or fusion polypeptide of the invention. The cosmetic may be in the form of a cream, powder, membrane, matrix, lotion, liquid, film, foam, sponge or mask, a composite of the two or more of these forms, or in any other form. Preferred cosmetics include hair products including shampoo, conditioner, injectable fillers and topical skin applications such as make-up and moisturizers.

[0229] A collagen-based product may be a medicament. This may be a composition, as hereinbefore described, or may be in the form of an injectable substance, a pill, capsule, tablet, liquid, cream, lotion, film, sponge, matrix, membrane, powder, or indeed any other suitable form. In such a medicament, collagen may be used as a carrier for an active ingredient. Thus, also provided is a collagen-based product consisting of any one or more of a fusion polypeptide, protein, nucleic acid sequence, expression vector of host cell, or denatured gelatin-like protein according to the invention in combination with other suitable chemicals in the form of a material, to produce for example a capsule to house a pharmaceutical. Alternatively, in the medicament, the collagen-based product may be the active ingredient, and will be present in an effective amount, as previously defined. Such medicaments will preferably comprise one or more excipients, optional additional ingredients, optional secondary pharmaceutical products, as well as other optional ingredients, for example as defined in relation to the compositions above.

[0230] Collagen is often used as a dietary or nutritional supplement. Therefore, the present invention provides a supplement comprising an effective amount of any one or more of a fusion polypeptide, protein, nucleic acid sequence, expression vector, host cell or denatured gelatin-like protein of the invention, and a nutritionally acceptable carrier.

[0231] Also provided are medical devices comprising any one or more of a fusion polypeptide, protein, nucleic acid or host cell of the invention, or a denatured gelatine-like protein of the invention. Medical devices include products such as films, matrixes, membranes, sponges, and mask, non-implantable substrates, implants, coatings, shields, threads, patches, tubes, plugs, scaffolds, injectable collagen, bandages, wound dressings, and collagen for in vitro applications. The medical device may comprise a composite of two or more of these product types, eg. film/sponge or film/sponge/film.

[0232] Such medical devices may be useful in hernia repair, spinal tension band, annular repair for the spine, and/or for repair, reconstruction, augmentation or replacement of a sphincter, meniscus, nucleus, rotator cuff, breast, bladder, and/or vaginal wall, corneal implants, scar revision, contracture revision, hypertrophic scar treatment, cosmetics, cosmetic surgery, wrinkle removal, general surgical settings, spinal, vascular, and/or neurosurgical settings, sports medicine surgical applications, plastic surgery, dermatology, and/or amputee stump revision, repair or correct congenital anomalies or acquired defects. Examples of such conditions are congenital anomalies such as hemifacial microsomia, malar and zygomatic hypoplasia, unilateral mammary hypoplasia, pectus excavatum, pectoralis agenesis (Poland's anomaly), and velopharyngeal incompetence secondary to cleft palate repair or submucous cleft palate (as a retropharyngeal implant); acquired defects (post traumatic, post surgical, or post infectious) such as depressed scars, subcutaneous atrophy (e.g., secondary to discoid lupis erythematosis), keratotic lesions, enopthalmos in the unucleated eye (also superior sulcus syndrome), acne pitting of the face, linear scleroderma with subcutaneous atrophy, saddle-nose deformity, Romberg's disease, and unilateral vocal cord paralysis; and cosmetic defects such as glabellar frown lines, deep nasolabial creases, circum-oral geographical wrinkles, sunken cheeks, and mammary hypoplasia, as well as any other conditions not mentioned herein.

[0233] In particular, injectable collagen may be useful in cell delivery, drug delivery and provision of clear collagens, dispersed collagens, micronized collagens (cryogenic grinding), and/or collagen product mixtures, e.g., collagen mixed with thrombin.

[0234] The medical device may further comprise analgesic, anti-inflammatory, antibiotic, and/or growth factors.

[0235] Because the collagen product retains a portion of its collagen constituents that remain at least partly bound to each other and retain a portion of native non-collagenous proteins, medical devices comprising the fusion polypeptide, or fusion protein of the invention may be non-immunogenic, compared to collagen implants derived from other sources (e.g., bovine-derived collagen).

[0236] Medical devices such as films and/or coatings may be useful, for example, in barrier dressings (e g, adhesion barriers and barriers to liquids), occlusions, structural supports, osteochondral retainers for cells/matrices (+/− analgesic), drug delivery devices, e g, collagen product coating combined with, and wraps for bone defects. In addition, catheters and stents may be coated In a further implementation, a plasticizer, bioactive, bioabsorbable, soluble, and/or biocompatible component may be combined with the collagen product or the gelatine.

[0237] In the collagen-based products described herein, a fusion polypeptide or protein of the invention may be coated onto a solid surface or insoluble support. The support may be in particulate or solid form, including for example a plate, a test tube, beads, a ball, a filter, fabric, polymer or a membrane. Methods for fixing a protein to solid surfaces or insoluble supports are known to those skilled in the art. The support may be a protein, for example a plasma protein or a tissue protein, such as an immunoglobulin or fibronectin. Alternatively, the support may be synthetic, for example a biocompatible, biodegradable polymer. Suitable polymers include polyethylene glycols, polyglycolides, polylactides polyorthoesters, polyanhydrides, polyphosphazenes, and polyurethanes. The inclusion of reactive groups in the fusion protein allows chemical coupling to inert carriers such that resulting product may be delivered to the desired site without entry into the bloodstream.

[0238] Another product of the invention is a tissue scaffold, comprising host cells of the invention. In a preferred embodiment, host cells of the invention may be seeded onto a scaffold to produce collagen, or collagen fragments, which may then be used in the treatment of skin and/or tissue related disorders.

[0239] Also provided is a product for technical use, for example in photographic or technical applications. Such a product may comprise a fusion polypeptide fusion, protein according to the invention in combination with silver halide emulsions.

[0240] The compositions, nutritional supplements, cosmetics, medical devices and food stuffs of the invention will preferably suitable be for pharmaceutical use in a subject, including an animal or human.

[0241] Throughout the description and claims of this specification, the words “comprise” and “contain” and variations of them mean “including but not limited to”, and they are not intended to (and do not) exclude other moieties, additives, components, integers or steps. Throughout the description and claims of this specification, the singular encompasses the plural unless the context otherwise requires. In particular, where the indefinite article is used, the specification is to be understood as contemplating plurality as well as singularity, unless the context requires otherwise.

[0242] Features, integers, characteristics, compounds, chemical moieties or groups described in conjunction with a particular aspect, embodiment or example of the invention are to be understood to be applicable to any other aspect, embodiment or example described herein unless incompatible therewith. All of the features disclosed in this specification (including any accompanying claims, abstract and drawings), and/or all of the steps of any method or process so disclosed, may be combined in any combination, except combinations where at least some of such features and/or steps are mutually exclusive. The invention is not restricted to the details of any foregoing embodiments. The invention extends to any novel one, or any novel combination, of the features disclosed in this specification (including any accompanying claims, abstract and drawings), or to any novel one, or any novel combination, of the steps of any method or process so disclosed.

[0243] The readers attention is directed to all papers and documents which are filed concurrently with or previous to this specification in connection with this application and which are open to public inspection with this specification, and the contents of all such papers and documents are incorporated herein by reference.

[0244] For the purposes of this specification and appended claims, unless otherwise indicated, all numbers expressing quantities of ingredients, percentages or proportions of materials, reaction conditions, and other numerical values used in the specification and claims, are to be understood as being modified in all instances by the term “about.” Accordingly, unless indicated to the contrary, the numerical parameters set forth in the following specification and attached claims are approximations that may vary depending upon the desired properties sought to be obtained by the present invention. At the very least, and not as an attempt to limit the application of the doctrine of equivalents to the scope of the claims, each numerical parameter should at least be construed in light of the number of reported significant digits and by applying ordinary rounding techniques.

[0245] Notwithstanding that the numerical ranges and parameters setting forth, the broad scope of the invention are approximations, the numerical values set forth in the specific examples are reported as precisely as possible. Any numerical value, however, inherently contains certain errors necessarily resulting from the standard deviation found in their respective testing measurements. Moreover, all ranges disclosed herein are to be understood to encompass any and all subranges subsumed therein. For example, a range of “1 to 10” includes any and all subranges between (and including) the minimum value of 1 and the maximum value of 10, that is, any and all subranges having a minimum value of equal to or greater than 1 and a maximum value of equal to or less than 10, e.g., 5.5 to 10.

[0246] It is noted that, as used in this specification and the appended claims, the singular forms “a,” “an,” and “the,” include plural referents unless expressly and unequivocally limited to one referent. Thus, for example, reference to “a monomer” includes two or more monomers, and reference to “a PVTD” includes two or more PVTDs.

### Example 1

### Recombinant Expression and Purification of Fusion Proteins

[0247] This example demonstrates a preferred method for preparing recombinant collagen hybrid fusion proteins of this invention. Specifically it shows the use of Escherichia coli as host organism to express three fusion proteins identified herein as sequences RCH-1, RCH-2 and RCH-3 (Table W), each containing a segment of a human collagen THD sequence flanked by two or more PVTDs (FIG. 11).

### Fusion Protein Design

[0248] The RCH-1 fusion protein contains: a PfN capping domain with sequence PfN-28 (Table H), followed in frame by a PCoil domain with sequence PCoil-13 (Table I), followed in frame by a 111-amino acid sequence from the THD of human α1(II) collagen (residues 442-552 from sequence hCol-03, Table K), followed in frame by a PfC capping domain with sequence PfC-12 (Table J). An oligonucleotide sequence (i.d. RCHDNA-1, Table W) was designed, with a BamHI restriction site (GGATTC) at the 5′ end, followed in frame by a codon-optimised nucleotide sequence coding for the RCH-1 sequence, followed in frame by a double stop codon (TAATAA) and followed in frame by an EcoRI restriction site (GAATTC).

[0249] The RCH-2 fusion protein contains: a PfN capping domain with sequence PfN-80 (Table H), followed in frame by a PCoil domain with sequence PCoil-43 (Table I), followed in frame by a 360-amino acid modified sequence from the THD of human α1(II) collagen (residues 442-801 from sequence hCol-03, Table K, modified at positions 701-705 to the sequence ERGSP), followed in frame by a PfC capping domain with sequence PfC-04 (Table J). An oligonucleotide sequence (i.d. RCHDNA-2, Table W) was designed, with a BamHI restriction site (GGATTC) at the 5′ end, followed in frame by a codon-optimised nucleotide sequence coding for the RCH-2 sequence, followed in frame by a double stop codon (TAATAA) and followed in frame by an EcoRI restriction site (GAATTC).

[0250] The RCH-3 fusion protein contains: a PfN capping domain with sequence PfN-15 (Table H), followed in frame by a 252-amino acid sequence from the human α1(II) collagen THD (residues 400-651 from sequence hCol-03, Table K), followed in frame by a PfC capping domain with sequence PfC-61 (Table J). An oligonucleotide sequence (i.d. RCHDNA-3, Table W) was designed, with a BamHI restriction site (GGATTC) at the 5′ end, followed in frame by a codon-optimised nucleotide sequence coding for the RCH-3 sequence, followed in frame by a double stop codon (TAATAA) and followed in frame by an EcoRI restriction site (GAATTC).

### Expression and Purification

[0251] The designed DNA sequences RCHDNA-1, RCHDNA-2 and RCHDNA-3 (Table W), were synthesized commercially (GenScript Corporation, Piscataway, N.J., USA) and were cloned separately into a proprietary E. coli protein expression vector of the Protein Expression Facility of the Faculty of Life Sciences, University of Manchester. This vector (referred here as pHis) is a modification of the pET14b vector (originally developed by Novagen), incorporating codon-optimised sequences and an optimised multiple cloning site. All three sequences were cloned using the BamHI and EcoRI restriction sites. Each protein expression vector contained a start codon followed by a nucleotide sequence coding for an N-terminal His₆ tag, a thrombin cleavage site, and one of the fusion proteins (RCH-1, RCH-2 or RCH-3). All sequence elements in each vector were appropriately in frame. Competent E. coli cells were transformed with the different protein expression vectors and the respective proteins were expressed after induction with 0.5 mM isopropyl β-D-1-thiogalactopyranoside (IPTG) at 15° C. overnight (RCH-1), 0.1 mM IPTG at 12° C. for 68 hours (RCH-2), and 0.1 mM IPTG at 16° C. for 68 hours (RCH-3). Expression reached bulk yield values of 50-150 mg of recombinant protein per litre of culture, with longer induction times producing larger amounts of protein. The proteins were expressed predominantly in the soluble fraction (FIG. 12), and were purified by nickel-affinity chromatography on Ni-NTA agarose columns (QIAGEN, USA) followed by size-exclusion chromatography on a HiLoad 16/60 Superdex 200 preparative grade column (GE Healthcare, UK). Where required, samples were concentrated using Vivaspin 20 centrifugal concentrators (Sartorius Stedim Biotech, France). Sample purity was assessed by SDS-PAGE and the identities of the purified RCH-1, RCH-2 and RCH-3 proteins were confirmed by mass spectrometry: bands of interest were excised from the gel, digested with trypsin overnight at 37° C., and analysed by LC-MS/MS using a NanoAcquity LC system (Waters, Manchester, UK) coupled to a 4000 Q-TRAP spectrometer (Applied Biosystems, Framingham, Mass.).

### Example 2

### Quaternary Structure and Molecular Morphology of the Recombinant Proteins

[0252] Molecular weight determination by light scattering Proteins RCH-1, RCH-2 and RCH-3 were expressed and purified as described in example 1 and analyzed by size-exclusion chromatography followed by multiangle laser light scattering (MALLS) using a DAWN EOS instrument (Wyatt Technology, CA, USA). Light scattering allows measurement of the molecular weights of proteins in their native conformation. Both RCH-1 and RCH-2 were shown to be trimeric, consistently with the expected basic quaternary structure of collagens and collagen-like proteins. RCH-3 formed mainly large molecular-weight aggregates that could remain soluble at concentrations up to 0.5 mg/ml. Removal of these aggregates by size-exclusion chromatography made possible to isolate a low-molecular weight fraction that showed RCH-3 to be trimeric as well.

### Electron Microscopy

[0253] The molecular morphology of trimeric RCH-1, RCH-2 and RCH-3 was examined by rotary shadowing electron microscopy (EM). Samples were prepared following the mica sandwich technique (Mould et al., 1985: Mica sandwich technique for preparing macromolecules for rotary shadowing. J. Ultrastruct. Res., 91: 66-76) and examined in a FEI Tecnai Twin Transmission electron microscope operated at 1204 V. Images were recorded on a TVIPS F214 cooled CCD camera, and magnification was calibrated using a diffraction grating replica (Agar Scientific, Stansted, UK). The molecular morphology of RCH-1 (FIG. 13) is identical to that of the EPcIA protein (FIG. 4), with which it shares the same domain architecture. The RCH-1 protein has a dumbbell shape with two globular regions connected by a partially flexible stalk. The stalk contains the THD (fragment of human collagen) and a trimeric PCoil domain (a trimeric α-helical coiled coil). The two globular regions correspond to trimers of PfN and PfC domains, respectively.

[0254] The molecular morphology of RCH-2 (FIG. 14) is also consistent with a longer collagen THD flanked by globular domains corresponding to PfN, PCoil, and PfC trimeric assemblies.

[0255] The molecular morphology of the low-molecular weight fraction of RCH-3 (FIG. 15) is consistent with a partially flexible collagen THD flanked by two globular regions, one being more prominent than the other in the electron microscopy images. The two globular regions correspond to trimers of PfN and PfC domains, respectively.

[0256] The molecular morphology of the high-molecular weight fraction of RCH-3 (FIG. 16A) reveals a dendrimer-like morphology for the high-molecular weight aggregates. These aggregates seem to occur through self-association of one of the globular regions, which would form the core of the dendrimer-like structures; from these central cores, the collagen THDs radiate and expose the globular regions on the other end at the periphery of the dendrimer-like structures. Exceptionally, similar structures have been observed in EM preparations of RCH-1 (FIG. 16B). The dendrimer-like structures from RCH-1 are consistent with oligomerization through the PfC globular regions and radial distribution of the THD, PCoil and PfN regions.

### Example 3

### Analysis of RCH-1 and RCH-2 by Circular Dichroism (CD)

### Conformational Analysis

[0257] The secondary structure of the fusion proteins RCH-1 and RCH-2 was investigated by CD spectroscopy using a J-810 spectropolarimeter equipped with a Peltier temperature controller. Each protein sample was dissolved in 10 mM Tris-HCl pH 7.5, 150 mM NaCl, at concentrations of 0.5 mg/ml. Wavelength scans between 200 and 260 nm were performed for each protein at different temperatures, from 4° C. to 80° C., using a CD-matched quartz cuvette with a 0.5 mm path length. CD spectra at 4° C. for RCH-1 (FIG. 17) and RCH-2 (FIG. 19) are consistent with the combination of a collagen triple helix signal from the collagen THDs and an α-helical coiled-coil signal from the PCoil domains. The α-helical signal is much stronger in the RCH-1 spectrum (FIG. 17) than in the RCH-2 spectrum (FIG. 19).

[0258] The spectra of samples of RCH-1 heated above 45° C. did not show the characteristics of the collagen triple helical conformation and instead indicated an α-helical conformation. At that temperature the THD had unfolded while the α-helical structure of the PfN and PCoil domains remained largely intact. The same behaviour had been observed for the rEPcIA protein (FIG. 5A). Subsequent temperature increase above 65° C. eliminated the α-helical signal and the spectra indicated an unfolded structure.

[0259] The spectra of samples of RCH-2 heated above 35° C. did not show the characteristics of the collagen triple helical conformation and instead indicated an α-helical conformation, in a similar way to RCH-1 above. After increasing the temperature to 45° C. the α-helical signal disappeared completely and the spectra indicated an unfolded structure. Thus, the α-helical structure of the PfN and PCoil domains of RCH-2 is less stable than that of RCH-1 or rEPcIA.

### Thermal Transitions

[0260] The thermal stability of RCH-1 and RCH-2 was investigated by monitoring the CD signal at 220 or 222 nm while varying the temperature (FIGS. 18 and 20). Samples (0.5 mg/ml in 10 mM Tris-HCl pH 7.5, 150 mM NaCl) were contained in a 0.5 mm quartz cuvette inside the J-810 spectropolarimeter and heated at a rate of 20° C./hour using the Peltier temperature controller; data were collected with 0.5 nm data pitch and 1 nm bandwidth. Both RCH-1 and RCH-2 show two transitions, the first one corresponding to the denaturation of the triple-helical structure of the collagen THDs and the second one corresponding to the denaturation of the α-helical coiled coil structure. Both collagen THDs denatured around the same temperature (32-33° C.), while the denaturation temperature of the α-helical coiled coil showed a significant difference between RCH-1 (53° C.) and RCH-2 (41° C.). The differences in thermal stability and in signal contribution to the overall CD spectrum (FIGS. 17 and 19) reflect unexpected conformational differences between the different PfN-PCoil domain combinations used in the RCH-1 and RCH-2 designs (FIG. 11).

[0261] The thermal unfolding of the collagen THDs of RCH-1 and RCH-2 above the first transition temperature was rapidly reversible: samples heated at 45° C. or 35° C. respectively and cooled down to 4° C. recovered CD spectra with the characteristic features of the collagen conformation. Samples heated above their second transition temperature did not recover rapidly their collagen conformation after cooling back to 4° C. Thus, the structural integrity of the capping domains, unaffected at the temperature of the first transition, appears critical for rapid reassembly of the collagen conformation of the RCHs. Nevertheless, samples heated above the second transition temperature did recover their collagen conformation, as shown by their CD spectra, after overnight incubation at 4° C.

### Example 4

### Cell Spreading Assays

### Fusion Protein Design

[0262] The three designed fusion proteins RCH-1, RCH-2 and RCH-3 contain natural or engineered integrin-binding sites (FIG. 11). The collagen sequence GFOGER (O: 4-hydroxyproline) is a high-affinity site for β1 integrins (Knight et al., 2000: The collagen-binding A-domains of integrins α1β1 and α2β1 recognize the same specific amino acid sequence, GFOGER, in native (triple-helical) collagens. J. Biol. Chem., 275: 35-40; Zhang et al., 2003: α11β1 integrin recognizes the GFOGER sequence in interstitial collagens. J. Biol. Chem., 278: 7270-7). Biomaterial formulations often use GFOGER peptides to promote cell adhesion (Reyes and Garcia, 2003: Engineering integrin-specific surfaces with a triple-helical collagen-mimetic peptide. J. Biomed. Mater. Res. A, 65: 511-23; Wojtowicz et al., 2010: Coating of biomaterial scaffolds with the collagen-mimetic peptide GFOGER for bone defect repair. Biomaterials 31: 2574-82). Hydroxylation is not critical, as the related GLPGER sequence mediates binding of prokaryotic collagen sequences to human integrin receptors (Caswell et al., 2008: Identification of the first prokaryotic collagen sequence motif that mediates binding to human collagen receptors, integrins α2β1 and α11β1. J. Biol. Chem., 283: 36168-75; Humtsoe et al., 2005: A streptococcal collagen-like protein interacts with the α2β1 integrin and induces intracellular signaling. J. Biol. Chem., 280: 13848-57).

### Cell Spreading Assays

[0263] We have used the GFPGER sequence in the THDs of all three RCH fusion proteins to monitor their ability as substrates for cell adhesion. We used human fibrosarcoma HT1080 cells (human epithelial fibrosarcoma cell line), provided by Martin Humphries (University of Manchester, UK). Cells were cultured and maintained in DMEM supplemented with 10% fetal calf serum (Sigma), 2 mM L-Glutamine, and antibiotics (penicillin and streptomycin). Rat-tail collagen (Sigma) was used as positive control for cell spreading assays. Briefly, 96-well sterile tissue culture plates (Costar, Corning Inc, NY, USA) were coated for 1 hour at room temperature, or overnight at 4° C., with collagen or the RCH proteins at varying concentrations (1, 2, 5, 10, 20, 30, 50 and 100 μg/ml in phosphate buffered saline, PBS); rat-tail collagen at 10 μg/ml in PBS was used as positive control; plates treated with PBS (no protein present) or coated with the bacterial collagen protein EPcIA, were used as negative controls. After coating, plates were washed with PBS and blocked with 10 mg/ml heat-denatured (10 minutes at 85° C.) BSA, for 1 hour at room temperature. The excess of BSA was removed, plates washed with PBS, and 100 μl of HT1080 cell suspension (1×10⁵ cells/ml) were added and allowed to adhere for 90 minutes at 37° C. After this time, unattached cells were gently washed with PBS and attached cells were fixed with 100 μl of 5% glutaraldehyde (for 30 minutes at room temperature). Plates were then inspected with an inverted phase contrast microscope at 20×-100× magnifications. The percentage of spreading was measured by counting the proportion of spread cells. FIGS. 21, 22 and 23 show spreading of HT1080 cells on RCH-1 and RCH-3.

[0264] Prior to the experiments described in this example, we had already established that the bacterial protein EPcIA (FIG. 1) does not support cell adhesion of any of a variety of cell lines. EPcIA does not contain any GFPGER integrin binding site in its collagen domain. Thus, any adhesion properties of the RCH proteins are due to the integrin-binding sites in their sequences (our EPcIA data indicate that PfN, PCoil and PfC domains do not support adhesion). Interaction between GF/LP/OGER sequences and β1 integrins requires collagen to be in triple helical conformation; thus, positive cell adhesion also confirms the correct conformation of the collagen domains of our fusion proteins.

### Example 5

### Recombinant Fusion Protein with Only One Capping Domain

[0265] This example demonstrates that it is possible to prepare stable and soluble recombinant collagen hybrid fusion proteins of this invention where only one of the sides of the collagen sequence is flanked by a capping PVCTD.

### Fusion Protein Design

[0266] The RCH-4 fusion protein (FIG. 48) contains a PfN capping domain with sequence PfN-15 (Table H), followed in frame by a 252-amino acid sequence from the THD of human α1(II) collagen (residues 400-651 from sequence hCol-03, Table K). An oligonucleotide sequence was designed (i.d. RCHDNA-4, Table W) by PCR-amplification of the RCHDNA-3 sequence (Table W) truncated at the beginning of the PfC domain by using appropriate primers. The coding sequence terminates with a double stop codon after the human collagen sequence and therefore does not contain a C-terminal PVCTD. The oligonucleotide sequence RCHDNA-4 contains a 5′ BamHI restriction site (GGATTC) and a 3′ EcoRI restriction site (GAATTC).

### Expression and Purification

[0267] The designed DNA sequence RCHDNA-4 (Table W) was cloned into pHis, a proprietary E. coli protein expression vector of the Protein Expression Facility of the Faculty of Life Sciences, University of Manchester (see Example 1 for vector details). The RCHDNA-4 sequence was cloned using the BamHI and EcoRI restriction sites. The resulting protein expression vector contained a start codon followed by a nucleotide sequence coding for an N-terminal His₆ tag, a thrombin cleavage site, and the sequence coding for the fusion protein RCH-4. All sequence elements in the vector are appropriately in frame. Competent E. coli cells were transformed with the protein expression vector and the RCH-4 protein was expressed after induction with 0.1 mM isopropyl β-D-1-thiogalactopyranoside (IPTG) at 16° C. for 66 hours. Expression of RCH-4 protein reached bulk yield values of approximately 50 mg of recombinant protein per litre of culture, similar to those of other RCHs (see Example 1). The protein was detected mainly (>90%) in the soluble fraction. RCH-4 was purified by nickel-affinity chromatography on Ni-NTA agarose columns (QIAGEN, USA) followed by size-exclusion chromatography on a HiLoad 16/60 Superdex 200 preparative grade column (GE Healthcare, UK). Sample purity was assessed by SDS-PAGE and the identity of the RCH-4 protein was confirmed by mass spectrometry. When needed, purified RCH-4 protein was concentrated using Vivaspin 20 centrifugal concentrators (Sartorius Stedim Biotech, France).

### Molecular Weight Determination by Light Scattering

[0268] Purified RCH-4 was analyzed by size-exclusion chromatography (SEC) followed by multiangle laser light scattering (MALLS) using a DAWN EOS instrument (Wyatt Technology, CA, USA). The MALLS analysis showed RCH-4 to be trimeric, and not to form the large molecular-weight aggregates that were predominant in RCH-3. Thus, the aggregation of RCH-3 into dendrimer-like macro-structures was induced by the presence of its 94-amino acid C-terminal PVCTD (sequence PfC-61, Table J).

### Conformational Analysis of RCH-4

[0269] The secondary structure of the fusion protein RCH-4 was investigated by CD spectroscopy using a J-810 spectropolarimeter equipped with a Peltier temperature controller. The RCH-4 protein was dissolved in 5 mM Tris-HCl pH 7.5, 150 mM NaCl, at a concentration of 0.13 mg/ml. A wavelength scan was performed between 190 and 250 nm at different temperatures, using a CD-matched quartz cuvette with a 1 mm path length. The CD spectra at 4° C. for RCH-4 (Table B) is consistent with a collagen triple helix signal from the collagen THD, with a small maximum at 218 nm and a deep minimum at 195 nm. The spectra of a RCH-4 sample heated above 45° C. did not show the characteristics of the collagen triple helical conformation.

### Thermal Transitions

[0270] The thermal stability of RCH-4 was investigated by monitoring the CD signal at 220 nm while varying the temperature. The sample (1.3 mg/ml in 10 mM Tris-HCl pH 7.5, 150 mM NaCl) was contained in a 1 mm quartz cuvette inside the J-810 spectropolarimeter and heated at a rate of 20° C./hour using the Peltier temperature controller; data were collected with 0.5 nm data pitch and 1 nm bandwidth. RCH-4 shows a transition at 22° C. corresponding to the denaturation of the triple helical structure of the collagen THD.

### Example 6

### Liophylization and Re-Solubilization of RCH-1

[0271] This example demonstrates the suitability of our RCHs for usual preparation protocols used for commercially available collagen proteins, where the collagens are lyophylized at the source for storage and commercial delivery and are then re-solubilised by the end user in appropriate buffers, prior to their use in diverse applications.

[0272] Purified samples of RCH-1 in 20 mM Tris-HCl pH 7.9, 150 mM NaCl, 1 mM EDTA buffer were transferred into MW CO 12-14,000 dialysis tubing (Medicell International Ltd.) and sealed at both ends for dialysis overnight on a Rodwell Monostir (200/250V) against MilliQ H₂O. Dialysed samples were analysed by SDS-PAGE to confirm the presence of the intact RCH-1 protein. The secondary structure of RCH-1 in water was also confirmed by CD spectroscopy.

[0273] Samples of RCH-1 dialysed into water were freeze-dried using a Heto Lyolab3000 lyophillizer. Freeze-dried samples were suitable for storage at −20° C. (short-term) or −80° C. (long-term). To test the limits of solubility in water, a sample of freeze-dried RCH-1 was weighted in a TR-scale (Denver Instrument Company) and then re-solubilized in the smallest possible volume of MilliQ H₂O to obtain a highly concentrated sample of RCH-1. MilliQ H₂O was added in 2 μl droplets until complete dissolution was observed. A concentration of approximately 40 mg/ml was achieved after adding 85 μl of H₂O to a 3.4 mg sample of lyophilised RCH-1.

### Example 7

### Large-Scale Production of RCH-1 Using a Pilot Fermentation Run

[0274] This example demonstrates the suitability of our RCHs for large-scale production using 20-litre fermentation equipment (Applikon Biotechnology).

[0275] A 5 ml sample of LB medium with ampicillin was inoculated with a single colony of E. coli cells expressing the RCH-1, and then incubated at 37° C. for 7 hours. Two 400 ml flasks of LB medium with ampicillin were then inoculated with 0.4 ml (0.1%) of the 7-hour culture and incubated overnight at 37° C. Medium for the 20-litre fermentation was prepared in as follows: Trypton (200 g), Yeast extract (200 g) and NaCl (200 g) were dissolved in water up to a final volume of 20 litres. Ampicillin was added to a final concentration of 50 μg/ml and the pH was adjusted to 7.0. The 20-litre LB medium was inoculated with 400 ml (2%) of the overnight culture (OD₆₀₀=0.059) and incubated at 37° C. for 1 h 50 min to a OD₆₀₀=0.611. The culture was then cooled to 25° C. for 10 minutes, and 20 ml of 100 mM IPTG were added to the fermentor (final concentration of IPTG was 0.5 mM). The culture was maintained at 16° C. and pH 7.0 for 18 hours after induction.

[0276] Cells were collected by centrifugation using a JLA-8100 rotor at 4° C., at 5000 rpm for 15 minutes in 6 1-litre bottles. Cells were then washed 6 times with 45 ml of 10 mM Tris-HCl pH 7.5, 150 mM NaCl. Subsequently the cells were weighted (80 g) and stored at −80° C. for later use.

[0277] To estimate the level of RCH-1 production a 1 g pellet of cells was allowed to thaw on ice for about 15 minutes before adding 10 ml of lysis buffer and one tablet of EDTA-free protease inhibitor cocktail (Complete Mini). The cells were then gently resuspended and sonicated on ice using a Sonopuls with a T13 probe (Bandelin) until viscosity was visibly reduced. The lysate was then centrifuged at 4° C. for 15 minutes at 17,000 RPM using an Avanti J-E centrifuge with a JA-17 Rotor (Beckman Coulter). Total and soluble protein content were analysed by SDS-PAGE, which showed that over-expressed RCHs was largely collected in the soluble fraction. From the amount of protein recovered by a small-scale nickel-affinity purification it was possible to estimate the bulk production of RCH-1 in the 20-litre pilot fermentation as approximately 0.8-1 mg/ml, which doubles the best yield obtained in 1-litre flask culture (0.3-0.5 mg/ml).

[0278] During our investigation on these collagen-like proteins it was discovered that the triple-helical domain of the bacteriophage collagen-like protein EPcIA has a very high melting temperature, 42° C. (FIGS. 3 and 5), much higher that what could have been expected from its relatively short sequence (111 amino acids) and the lack of prolyl hydroxylation or glycosylation. It was also discovered that the triple helical collagen domain recovered its native conformation very quickly after thermal denaturation. Recombinant expression of the EPcIA protein in E. coli demonstrated that this protein is highly soluble and does not accumulate in insoluble inclusion bodies. These three properties would make EPcIA itself an interesting molecule for further development into biomaterial applications. However, it was hypothesized that the molecular architecture of EPcIA could be exploited for the design of new proteins containing human collagen sequences that could be expressed successfully in E. coli with high yields, good solubility, and improved thermal stability.

[0279] Some of the non-collagenous capping domains present in EPcIA (PfN, PfC, PCoil, FIG. 1) were contributing to maintain these prokaryotic collagen proteins in soluble form, were contributing to the increase in the thermal stability of the collagen triple helical domain, and were facilitating the refolding of the collagen triple helical domains after thermal denaturation. The data indicates that the PfC, PfN and PCoil regions are trimerization domains that play equivalent roles to the N- and C-terminal propeptides in fibrillar collagens. They would act as registration peptides, maintaining these collagen-like proteins in soluble form and contributing to the thermal stability of the collagen regions.

### SUMMARY

[0280] Herein, the inventors designed a novel approach where the PfC, PfN and PCoil domains from bacteriophage collagen-like proteins could be used as capping domains for the expression of human or mammalian triple-helical collagen sequences in E. coli. In recombinant protein designs, these domains are fused in frame with heterologous collagen sequences of human origin, to assist them in their proper folding, solubility, and thermal stability. The phage capping domains would help in maintaining solubility and would compensate in part for the lack of prolyl hydroxylation, providing enough stabilization to overcome complete proteolytic degradation during protein expression. Due to its unique structure, triple helical collagen is highly resistant to proteolysis; however, monomer chains are largely unfolded and therefore susceptible to degradation in prokaryotes (that do not have the endoplasmic reticulum into which secrete the newly synthesized polypeptide chains). Successful expression of soluble human or mammalian collagen sequences in E. coli is therefore dependent on how quickly the recombinant protein can adopt the triple helical form before the individual chains are degraded by proteolysis. The capping domains of phage collagen-like proteins seem to be exceptionally effective in that task.

[0281] To test the hypothesis we generated several recombinant human collagens (rhCs) where the collagen-like sequence of a bacterial or phage collagen-like protein was exchanged with a sequence from a human collagen (FIG. 7; FIG. 11). Successful expression of these rhCs in E. coli was achieved entirely expressed as soluble proteins, with no evidence of inclusion body formation (FIG. 12). Solubility in water of purified rhCs at least up to 40 mg/ml was shown. Their molecular morphology was consistent with a folded collagen conformation (FIGS. 13-20) that contained correctly folded cell-binding sites that supported cell-adhesion via eukaryotic receptor recognition (FIGS. 21-23). The RHCs containing both N-terminal and C-terminal capping domains showed melting temperatures of 32-33° C. for the triple helical human collagen domains. Their thermal stability is higher than that of much longer, non-hydroxylated type I collagen sequences produced (in much smaller amounts) in transgenic plants. Thus, the phage capping domains significantly stabilize the triple helical domains of in-frame human collagen sequences.

[0282] Therefore domains from bacteriophage collagen-like proteins can contribute to the solubility and stability of collagen triple helical domains, including those with human sequences.

Lengthy table referenced here
US20130237486A1-20130912-T00001
Please refer to the end of the specification for access instructions.

Lengthy table referenced here
US20130237486A1-20130912-T00002
Please refer to the end of the specification for access instructions.

Lengthy table referenced here
US20130237486A1-20130912-T00003
Please refer to the end of the specification for access instructions.

Lengthy table referenced here
US20130237486A1-20130912-T00004
Please refer to the end of the specification for access instructions.

Lengthy table referenced here
US20130237486A1-20130912-T00005
Please refer to the end of the specification for access instructions.

Lengthy table referenced here
US20130237486A1-20130912-T00006
Please refer to the end of the specification for access instructions.

Lengthy table referenced here
US20130237486A1-20130912-T00007
Please refer to the end of the specification for access instructions.

Lengthy table referenced here
US20130237486A1-20130912-T00008
Please refer to the end of the specification for access instructions.

Lengthy table referenced here
US20130237486A1-20130912-T00009
Please refer to the end of the specification for access instructions.

Lengthy table referenced here
US20130237486A1-20130912-T00010
Please refer to the end of the specification for access instructions.

Lengthy table referenced here
US20130237486A1-20130912-T00011
Please refer to the end of the specification for access instructions.

Lengthy table referenced here
US20130237486A1-20130912-T00012
Please refer to the end of the specification for access instructions.

Lengthy table referenced here
US20130237486A1-20130912-T00013
Please refer to the end of the specification for access instructions.

Lengthy table referenced here
US20130237486A1-20130912-T00014
Please refer to the end of the specification for access instructions.

Lengthy table referenced here
US20130237486A1-20130912-T00015
Please refer to the end of the specification for access instructions.

Lengthy table referenced here
US20130237486A1-20130912-T00016
Please refer to the end of the specification for access instructions.

Lengthy table referenced here
US20130237486A1-20130912-T00017
Please refer to the end of the specification for access instructions.

Lengthy table referenced here
US20130237486A1-20130912-T00018
Please refer to the end of the specification for access instructions.

Lengthy table referenced here
US20130237486A1-20130912-T00019
Please refer to the end of the specification for access instructions.

Lengthy table referenced here
US20130237486A1-20130912-T00020
Please refer to the end of the specification for access instructions.

Lengthy table referenced here
US20130237486A1-20130912-T00021
Please refer to the end of the specification for access instructions.

Lengthy table referenced here
US20130237486A1-20130912-T00022
Please refer to the end of the specification for access instructions.

Lengthy table referenced here
US20130237486A1-20130912-T00023
Please refer to the end of the specification for access instructions.

LENGTHY TABLES
The patent application contains a lengthy table section. A copy of the table is available in electronic form from the USPTO web site (http://seqdata.uspto.gov/?pageRequest=docDetail&DocID=US20130237486A1). An electronic copy of the table will also be available from the USPTO upon request and payment of the fee set forth in 37 CFR 1.19(b)(3).

The application's sequence listing, which the Patent Office published only in electronic form, follows.

SEQUENCE LISTING (1193 sequences)

SEQ ID NO: 1 - protein, 404 aa, Escherichia coli
MAVKISGVLKDGTGKPVENCTIQLKARRTSSTVVVNTVASENPDEAGRYSMDVEYGQYSVILLVEGFPPSHAGTITVYEDSQPGTLNDFLGAMSEDDVRPEALRRFELMVEEVARHAEEAKKNAGEAETSARNAGISASQAEESAANADTSAGEASESARQAAESAAAAKQSEEASSSSASAAAQKASESSQSAAEAELSRKTAESAAGNAARDATTATEKARESAESAQSAEQSRIAAEEAVNRIPTVVGPPGPKGEQGPAGPQGPKGDKGERGETGLTGNAGPQGPKGDTGAAGPAGPQGPKGETGAAGPVGATGPQGPKGDPGETQIRFRLGPGNIIETNSNGWFPDTDGALITGLTFLDPKDATRVQGFFQHLQVRFGDGPWQDVKGLDEVGSDTGRTGE

SEQ ID NO: 2 - protein, 437 aa, Escherichia coli
MAVKISGVLKDGTGKPVENCTIQLKARRTSSTVVVNTVASENPDEAGRYSMDVEYGQYRVILLVEGFPPSHAGTITVYEDSQPGTLNDFLGAMSEDDVRPEALRRFELMVEEVARHAEEAKKNAGEAETSARNAGISASQAEESAANADTSAGEASESARQAAESAAAAKQSEEASSSSASAAAQKASESSQSAAEAELSRKTAESAAGNAARDATTATEKARESAESAQSAEQSRIAAEEAVNRIPTVVGPPGPKGEQGPAGPQGPKGDKGERGDTGPVGATGERGPAGDAGPAGPQGPKGDMGERGETGLTGNAGPQGPKGDTGAAGPAGPQGPKGETGVAGPVGATGPQGPKGDPGETQIRFRLGPGNIIETNSNGWFPDTDGALITGLTFLDPKDATRVQGFFQHLQVRFGDGPWQDVKGLDEVGSDTGRTGE

SEQ ID NO: 3 - protein, 437 aa, Escherichia coli
MAVKISGVLKDGTGKPVQNCTIQLKAKRNSTTVVVNTLASENPDEAGRYSMDVEYGQYSVILLVEGFPPSHAGTITVYEDSQPGTLNDFLGAMSEDDVRPEALRRFELMVEEAARHAEEAKKNAGEAETSARNAGISASQAEESAANADTSAGDASESARQAAESAASAKQSEDASSSSASAAAQKASESLQSATDAELSKKMAESAAGNAARDATTATEKARESAESAQSAEQSRIAAEEAVNRIPTVVGPPGPKGEQGPAGPQGPKGDKGERGDTGPVGATGERGPAGDAGPAGPQGPKGDRGERGETGLTGNAGPQGPKGDTGAAGPAGPQGPKGETGAAGPVGATGPQGPKGDPGETQIRFRLGPASIIETNSNGWFPDTDGALITGLTFLDPKDATQVQGLFQHLQVRFGDGPWQDVKGLNEVGSDTGRTGE

SEQ ID NO: 4 - protein, 437 aa, Escherichia coli
MAVKISGVLKDGTGKPVENCTIQLKARRNSATVVVNTVASENPDEAGRYSMDVEYGQYSVILLVEGFPPSHAGTITVYEDSQPGTLNDFLGAMSEDDVRPEALRRFELMVEEAARHAEEAKKNAGEAETSARNAGISASQAEESAANADTSAGDASESARQAAESAAAAKQSEEASSSSASAAAQKASESLQSATDAELSKKTAESAAGNAARDATTAAEKARESAESAQSAEQSRIAAEEAVNRIPTVVGPPGPKGEPGPAGPQGPKGDKGERGDTGPAGATGERGPAGDAGPAGPQGPKGDRGERGETGLTGNAGPQGPKGDTGAAGPAGPQGPKGETGAAGPVGATGPQGPKGDPGETQIRFRLGPGNIIETNSHGWFPDTDGALITGLTFLDPKDATRVQGFFQHLQVRFGDGPWQDVKGLDEVGSDTGRTGE

SEQ ID NO: 5 - protein, 407 aa, Escherichia coli
MAVKISGVLKDGTGKPVENCTIQLKARRNSATVVVNTVASENPDEAGRYSMDVEYGQYSVILLVEGFPPSHAGTITVYEDSQPGTLNDFLGAMSEDDVRPEALRRFELMVEEAARHAEEAKKNAGEAETSARNAGISASQAEESAANADTSAGDASESARQAAESAAAAKQSEEASSSSASAAAQKASESSQSAADAELSKKTAESAAGNAARDATTATEKARESAESAQSAEQSRIAAEEAVNRIPTVVGPPGPKGEPGPAGPQGPKGDKGERGDTGPAGATGERGPAGDAGPAGPAGPAGPQGPKGETGAAGPVGATGPQGPKGDPGETQIRFRLGPGNIIETNSHGWFPDTDGALITGLTFLDPKDATRVQGFFQHLQVRFGDGPWQDVKGLDEVGSDTGRTGE

SEQ ID NO: 6 - protein, 437 aa, Escherichia coli
MAVKISGVLKDGTGKPVENCTIQLKARRTSSTVVVNTVASENPDEAGRYSMDVEYGQYSVILLVEGFPPSHAGTITVYEDSQPGTLNDFLGAMSEDDVRPEALRRFELMVEEAARHAEEAKKNAGEAETSARNAGISASQAEENAANADTSAGDASESARQAAESAAAAKQSEEASSSSASAAAQKASESSQSAAEAELSRKTAESAAGNASRDATTAAEKARESAESAQSAEQSRIAAEEAVNRIPTVVGPPGPKGEQGPAGPQGPKGDKGERGDTGPVGATGERGPAGDAGPAGPQGPKGDRGERGETGLTGNAGPQGPKGDTGAAGPAGPQGPKGETGATGPVGATGPQGPKGDPGETQIRFRLGPGNIIETNSNGWFPDTDGALITGLTFLAPKDATRVQVFFQHLQVRFGDGPWQDVKGLDEVGSDTGRTGE

SEQ ID NO: 7 - protein, 437 aa, Escherichia coli
MAVKISGVLKDGTGKPVENCTIQLKARRTSSTVVVNTVASENPDEAGRYSMDVEYGQYSVILLVEGFPPSHAGTITVYEDSQPGTLNDFLGAMSEDDVRPEALRRFELMVEEVARHAEEAKKNAGEAETSARNAGISASQAEESAANADTSAGEASESARQAAESAASAKQSEDASSSSASAAAQKASESSQSAAEAELSRKTAESAAGNAARDATTATEKARESAESAQSAEQSRIAAEEAVNRIPTVVGPPGPKGEQGPAGPQGPKGDKGERGDTGPVGATGERGPAGDAGPAGPQGPKGDRGERGETGLTGNAGPQGPKGDTGAAGPAGPQGPKGETGAAGPVGATGPQGPKGDPGETQIRFRLGPGNIIETNSHGWFPDTDGALITGLTFLDPKDATRVQGFFQHLQVRFGDGPWQDVKGLDEVGSDTGRTGE

SEQ ID NO: 8 - protein, 437 aa, Escherichia coli
MAVKISGVLKDGTGKPVENCTIQLKARRNSATVVVNTVASENPDEAGRYSMDVEYGQYSVILLVEGFPPSHAGTITVYEDSQPGTLNDFLGAMSEDDVRPEALRRFELMVEEAARHAEEAKKNAGEAETSARNAGISSSKAEASAANADTSAGDALESARQAAESAAAAKQSEDASSSSASAAAQKASESSQSAAEAELSRKTAESAAGNAARDATTATEKARESAESAQSAEQSRIAAEEAVNRIPTVVGPPGPKGEQGPAGPQGPKGDKGERGDTGPVGATGERGPAGDAGPAGPQGPKGDRGERGETGLTGNAGPQGPKGDTGAAGPAGPQGPKGETGAAGPVGATGPQGPKGDPGEAQIRFRLGPASIIETNSNGWFPDTDGALITGLTFLDPKDATQVQGLFRHLQVRFGDGPWQDVKGLDEVGSDTGRTGE

SEQ ID NO: 9 - protein, 442 aa, Escherichia coli
MGVGMAAVQISGVLKDGAGKPIQNCTIQLKARRNSTTVVVNTVASENPDEAGRYSMDVEYGQYSVTLLVEGFPPSHAGTITVYEDSQPGTLNDFLGAMSEDDVRPEALRRFELMVEEAARHAEEAKKNAGEAETSARNAGISASQAEESAANADTSAGDASESARQAAESAAAAKQSEEASSSSASAAAQKASESSQSAAEAELSRKTAESAAGNAARDATTATEKARESAESAQSAEQSRIAAEDAVNRIPTVVGPPGPKGEPGPAGPQGPKGDKGERGDTGPAGATGERGPGGDTGPAGPQGPKGDRGERGETGLTGSTGPQGPKGDTGATGPAGPQGPKGETGAAGPVGATGPQGAKGDPGETQIRFRLGPMRIIETNSYGWFPGTDGALITGLTFLDPKDATQVQGMFQHLQVRFGDGPWQDVKGLDEVGSDTGRTGE

SEQ ID NO: 10 - protein, 437 aa, Escherichia coli
MAVKISGVLKDGTGKPVENCTIQLKARRTSSTVVVNTVASENPDEAGRYSMDVEYGQYSVILLVEGFPPSHAGTITVYEDSQPGTLNDFLGAMSEDDVRPEALRRFELMVEEAARHAEEAKKNAGEAETSARNAGISASQAEESAANADTSAGDASESARQAAESAAAAKQSEEASSSSASAAAQKASESSQSAAEAELSRKTAESAAGNAARDATTATEKARESAESAQSAEQSRIAAEEAVNRIPTVVGPPGPKGEPGPAGPQGPKGDKGERGDTGPAGATGERGPAGDAGPAGPQGPKGDRGERGETGLTGNAGPQGPKGDTGAAGPAGPQGPKGETGAAGPVGATGPQGPKGDPGETQIRFRLGPASIIETNSHGWFPGTDGALITGLTFLAPKDATRVQVFFQHLQVRFGDGPWQDVKGLDEVGSDTGRTGE

SEQ ID NO: 11 - protein, 437 aa, Escherichia coli
MAVKISGVLKDGTGKPVENCTIQLKARRNSATVVVNTVASENPDEAGRYSMDVEYGQYSVILLVEGFPPSHAGTITVYEDSQPGTLNDFLGAMSEDDVRPEALRRFELMVEEAARHAEEAKKNAGEAETSARNAGISASQAEESAANADTSAGDASESARQAAESAAAAKQSEEASSSSASAAAQKASESLQSATDAELSKKTAESAAGNAARDATTAAEKARESAESAQSAEQSRIAAEEAVNRIPTVVGPPGPKGEPGPAGPQGPKGDKGERGDTGPAGATGERGPAGDAGPAGPQGPKGDRGERGETGLTGNAGPQGPKGDTGAAGPAGPQGPKGETGAAGPVGATGPQGPKGDPGETQIRFRLGPGNIIETNSNGWFPDTDGALITGLTFLDPKDTTQVQGLFRHLQVRFGDGPWQDVKGLNEVGSDTGRTGE

SEQ ID NO: 12 - protein, 437 aa, Escherichia coli
MAVKISGVLKDGTGKPVENCTIQLKARRTSSTVVVNTVASENPDEAGRYSMDVEYGQYSVILLVEGFPPSHAGTITVYEDSQPGTLNDFLGAMSEDDVRPEALRRFELMVEEAARHAEEAKKNAGEAETSARNAGISSSKAEASAANADTSAGDALESARQAAESAAAAKQSEDASSSSASAAAQKASESSQSAAEAELSRKTAESAAGNAARDATTATEKARESAESAQSAEQSRIAAEEAVNRIPTVVGPPGPKGEQGPAGPQGPKGDKGERGDTGPVGATGERGPAGDAGPAGPQGPKGDRGERGETGLTGNAGPQGPKGDTGAAGPAGPQGPKGETGAAGPVGATGPQGPKGDPGETQIRFRLGPGNIIETNSNGWFPDTDGALITGLTFLAPKDTTRVQGFFQHLQVRFGDGPWQDVKGLDEVGSDTGRTGE

SEQ ID NO: 13 - protein, 434 aa, Escherichia coli
MTVKISGVLKDGTGKPVQNCTIVLKARRTSSTVVVNTVASENPDEAGRYSMDVEYGQYSVILLVEGFPPSHAGTITVYEDSQPGTLNDFLGAMSEDDVRPEALRRFELMVEEAARHAEEAKKNAGEAETSARNAGISASQAEENAANADTSAGDASESARQAAESAAAAKQSEEASSSSASAAAQKASESLQSATDAELSKKTAESAAGNAARDATTAAEKARESAESAQSAEQSRIAAEEAVNRIPTVVGPPGPKGEPGPAGPQGPKGDKGERGDTGPAGATGERGPAGDAGPAGPQGPKGDRGETGLTGNAGPQGPKGDTGAAGPAGPQGPKGETGAAGPVGATGPQGPKGDPGETQIRFRLGPASIIETNSHGWFPGTDGALITGLTFLAPKDTTRVQGFFQHLQVRFGDGPWQDVKGLDEVGSDTGRTGE

SEQ ID NO: 14 - protein, 437 aa, Escherichia coli; identical to SEQ ID NO: 10

SEQ ID NO: 15 - protein, 437 aa, Escherichia coli; identical to SEQ ID NO: 8

SEQ ID NO: 16 - protein, 438 aa, Escherichia coli
MAAVQISGVLKDGAGKPIQNCTIQLKARRNSTTVVVNTVASENPDEAGRYSMDVEYGQYSVTLLVEGFPPSHAGTITVYEDSQPGTLNDFLGAMSEDDVRPEALRRFELMVEEAARHAEEAKKNAGEAETSARNAGISASQAEESAANADTSAGDASESARQAAESAAAAKQSEEASSSSASAAAQKASESSQSAAEAELSRKTAESAAGNAARDATTATEKARESAESAQSAEQSRIAAEDAVNRIPTVVGPPGPKGEPGPAGPQGPKGDKGERGDTGPAGATGERGPGGDTGPAGPQGPKGDRGERGETGLTGSTGPQGPKGDTGATGPAGPQGPKGETGAAGPVGATGPQGAKGDPGETQIRFRLGPMRIIETNSYGWFPGTDGALITGLTFLDPKDATQVQGMFQHLQVRFGDGPWQDVKGLDEVGSDTGRTGE

SEQ ID NO: 17 - protein, 437 aa, Escherichia coli; identical to SEQ ID NO: 7

SEQ ID NO: 18 - protein, 407 aa, Escherichia coli
MAVKISGVLKDGTGKPVENCTIQLKARRTSSTVVVNTVASENPDEAGRYSMDVEYGQYSVILLVEGFPPSHAGTITVYEDSQPGTLNDFLGAMSEDDVRPEALRRFELMVEEAARHAEEAKKNAGEAETSARNAGISASQAEESAANADTSAGDASESARQAAESAAAAKQSEEASSSSASAAAQKASESSQSAADAELSKKTAESAAGNAARDATTATEKARESAESAQSAEQSRIAAEEAVNRIPTVVGPPGPKGEPGPAGPQGPKGDKGERGDTGPAGATGERGPAGDAGPAGPAGPAGPQGPKGETGAAGPVGATGPQGPKGDPGETQIRFRLGPGNIIETNSHGWFPDTDGALITGLTFLDPKDATRVQGFFQHLQVRFGDGPWQDVKGLDEVGSDTGRTGE

SEQ ID NO: 19 - protein, 437 aa, Escherichia coli; identical to SEQ ID NO: 11

SEQ ID NO: 20 - protein, 434 aa, Escherichia coli; identical to SEQ ID NO: 13

SEQ ID NO: 21 - protein, 438 aa, Escherichia coli; identical to SEQ ID NO: 16

SEQ ID NO: 22 - protein, 437 aa, Escherichia coli; identical to SEQ ID NO: 6

SEQ ID NO: 23 - protein, 451 aa, Escherichia coli
MTARRFRRLFCGVNMAVKISGVLKDGTGKPVENCTIQLKARRTSSTVVVNTVASENPDEAGRYSMDVEYGQYSVILLVEGFPPSHAGTITVYEDSQPGTLNDFLGAMSEDDVRPEALRRFELMVEEAARHAEEAKKNAGEAETSARNAGISASQAEESAANADTSAGDASESARQAAESAAAAKQSEEASSSSASAAAQKASESSQSAAEAELSRKTAESAAGNAARDATTATEKARESAESAQSAEQSRIAAEEAVNRIPTVVGPPGPKGEPGPAGPQGPKGDKGERGDTGPAGATGERGPAGDAGPAGPQGPKGDRGERGETGLTGNAGPQGPKGDTGAAGPAGPQGPKGETGAAGPVGATGPQGPKGDPGETQIRFRLGPASIIETNSHGWFPGTDGALITGLTFLAPKDATRVQVFFQHLQVRFGDGPWQDVKGLDEVGSDTGRTGE

SEQ ID NO: 24 - protein, 437 aa, Escherichia coli; identical to SEQ ID NO: 4

SEQ ID NO: 25 - protein, 407 aa, Escherichia coli; identical to SEQ ID NO: 5

SEQ ID NO: 26 - protein, 439 aa, Escherichia coli
MNMAVKISGVLKDGTGKPVENCTIQLKARRTSSTVVVNTVASENPDEAGRYSMDVEYGQYSVILLVEGFPPSHAGTITVYEDSQPGTLNDFLGAMSEDDVRPEALRRFELMVEEAARHAEEAKKNAGEAETSARNAGISSSKAEASAANADTSAGDALESARQAAESAAAAKQSEDASSSSASAAAQKASESSQSAAEAELSRKTAESAAGNAARDATTATEKARESAESAQSAEQSRIAAEEAVNRIPTVVGPPGPKGEQGPAGPQGPKGDKGERGDTGPVGATGERGPAGDAGPAGPQGPKGDRGERGETGLTGNAGPQGPKGDTGAAGPAGPQGPKGETGAAGPVGATGPQGPKGDPGETQIRFRLGPGNIIETNSNGWFPDTDGALITGLTFLAPKDTTRVQGFFQHLQVRFGDGPWQDVKGLDEVGSDTGRTGE

SEQ ID NO: 27 - protein, 437 aa, Escherichia coli; identical to SEQ ID NO: 7

SEQ ID NO: 28 - protein, 437 aa, Escherichia coli; identical to SEQ ID NO: 11

SEQ ID NO: 29 - protein, 434 aa, Escherichia coli; identical to SEQ ID NO: 13

SEQ ID NO: 30 - protein, 437 aa, Escherichia coli; identical to SEQ ID NO: 6

SEQ ID NO: 31 - protein, 437 aa, Escherichia coli; identical to SEQ ID NO: 8

SEQ ID NO: 32 - protein, 438 aa, Escherichia coli; identical to SEQ ID NO: 16

SEQ ID NO: 33 - protein, 437 aa, Escherichia coli
MAVKISGVLKDGTGKPVENCTIQLKARRNSATVVVNTVASENPDEAGRYSMDVEYGQYSVILLVEGFPPSHAGTITVYEDSQPGTLNDFLGAMSEDDVRPEALRRFELMVEEAARHAEEAKKNAGEAETSARNAGISASQAEESAANADTSAGDASESARQAAESAAAAKQSEEASSSSASAAAQKASESLQSATDAELSKKTAESAAGNAARDATTAAEKARESAESAQSAEQSRIAAEEAVNRIPTVVGPPGPKGEPGPAGPQGPKGDKGERGDTGPVGATGERGPAGDAGPAGPQGPKGDRGERGETGLTGNAGPQGPKGDTGAAGPAGPQGPKGETGAAGPVGATGPQGPKGDPGETQIRFRLGPGNIIETNSNGWFPDTDGALITGLTFLAPKDTTRVQGFFQHLQVRFGDGPWQDVKGLDEVGSDTGRTGE

SEQ ID NO: 34 - protein, 407 aa, Escherichia coli; identical to SEQ ID NO: 5

SEQ ID NO: 35 - protein, 434 aa, Escherichia coli; identical to SEQ ID NO: 13

SEQ ID NO: 36 - protein, 437 aa, Escherichia coli; identical to SEQ ID NO: 11

SEQ ID NO: 37 - protein, 437 aa, Escherichia coli; identical to SEQ ID NO: 4

SEQ ID NO: 38 - protein, 438 aa, Escherichia coli; identical to SEQ ID NO: 16

SEQ ID NO: 39 - protein, 451 aa, Escherichia coli; identical to SEQ ID NO: 23

SEQ ID NO: 40 - protein, 437 aa, Escherichia coli; identical to SEQ ID NO: 4

SEQ ID NO: 41 - protein, 437 aa, Escherichia coli; identical to SEQ ID NO: 11

SEQ ID NO: 42 - protein, 434 aa, Escherichia coli; identical to SEQ ID NO: 13

SEQ ID NO: 43 - protein, 407 aa, Escherichia coli; identical to SEQ ID NO: 5

SEQ ID NO: 44 - protein, 407 aa, Escherichia coli; identical to SEQ ID NO: 5

SEQ ID NO: 45 - protein, 437 aa, Escherichia coli
MAVKISGVLKDGTGKPVENCTIQLKARRNSATVVVNTVASENPDEAGRYSMDVEYGQYSVILLVEGFPPSHAGTITVYEDSQPGTLNDFLGAMSEDDVRPEALRRFELMVEEAARHAEEAKKNAGEAETSARNAGISASQAEESAANADTSAGDALESARQAAESAAAAKQSEEASSSSASAAAQKASESSQSAAEAELSRKTAESAAGNAARDATTATEKARESAESAQSAEQSRIAAEEAVNRIPTVVGPPGPKGEQGPAGPQGPKGDKGERGDTGPVGATGERGPAGDAGPAGPQGPKGDRGERGETGLTGNAGPQGPKGDTGAAGPAGPQGPKGETGAAGPVGATGPQGPKGDPGETQIRFRLGPASIIETNSNGWFPDTDGALITGLTFLDPKDATQVQGLFRHLQVRFGDGPWQDVKGLDEVGSDTGRTGE

SEQ ID NO: 46 - protein, 437 aa, Escherichia coli
MAVKISGVLKDGTGKPVENCTIQLKARRTSSTVVVNTVASENPDEAGRYSMDVEYGQYSVILLVEGFPPSHAGTITVYEDSQPGTLNDFLGAMSEDDVRPEALRRFELMVEEAARHAEEAKKNAGEAETSARNAGISASQAEESAANADTSAGDASESARQAAESAAAAKQSEDASSSSASAAAQKASESSQSAAEAELSRKTAESAAGNAARDATTATEKARESAESAQSAEQSRIAAEEAVNRIPTVVGPPGPKGEQGPAGPQGPKGDKGERGDTGPVGATGERGPAGDAGPAGPQGPKGDRGERGETGLTGNAGPQGPKGDTGAAGPAGPQGPKGETGAAGPVGATGPQGPKGDPGETQIRFRLGPGNIIETNSNGWFPDTDGALITGLTFLAPKDATRVQGFFQHLQVRFGDGPWQDVKGLDEVGSDTGRTGE

SEQ ID NO: 47 - protein, 437 aa, Escherichia coli
MAVKISGVLKDGTGKPVENCTIQLKARRNSATVVVNTVASENPDEAGRYSMDVEYGQYSVILLVEGFPPSHAGTITVYEDSQPGTLNDFLGAMSEDDVRPEALRRFELMVEEAARHAEEAKKNAGEAETSARNAGISASQAEESAANADTSAGDASESARQAAESAAAAKQSEEASSSSASAAAQKASESSQSAAEAELSRKTAESAAGNAARDATTATEKARESAESAQSAEQSRIAAEEAVNRIPTVVGPPGPKGEPGPAGPQGPKGDKGERGDTGPAGATGERGPAGDAGPAGPQGPKGDRGERGETGLTGNAGPQGPKGDTGAAGPAGPQGPKGETGAAGPVGATGPQGPKGDPGETQIRFRLGPASIIETNSHGWFPGTDGALITGLTFLAPKDATRVQVFFQHLQVRFGDGPWQDVKGLDEVGSDTGRTGE

SEQ ID NO: 48 - protein, 438 aa, Escherichia coli
MAAVQISGVLKDGAGKPIQNCTIQLKARRNSTTVVVNTVASENPDEAGRYSMDVEYGQYSVTLLVEGFPPSHAGTISVYEDSQPGTLNDFLGAMTEDDARPEALRRFEQMVEEAARHAEEAKKNAGEAETSARNAGISASKAEASAANADTSAEDASESARQAAESAASAKKSEEASSSSASEAAQKASESLQSATDAELSKKTAESAAGNAARDATTSTEKARESAESAQSAEQSRIAAEDAVNRIPTVVGPPGPKGEPGPAGPQGPKGDKGERGDTGPAGATGERGPGGDTGPAGPQGPKGDRGERGETGLTGSTGPQGPKGDTGATGPAGPQGPKGETGAAGPVGATGPQGAKGDPGETQIRFRLGPMRIIETNSYGWFPGTDGALITGLTFLDPKDATQVQGMFQHLQVRFGDGPWQDVKGLDEVGSDTGRTGE

SEQ ID NO: 49 - protein, 437 aa, Escherichia coli
MAVKISGVLKDGTGKPVENCTIQLKARRNSATVVVNTVASENPDEAGRYSMDVEYGQYSVILLVEGFPPSHAGTITVYEDSQPGTLNDFLGAMSEDDVRPEALRRFELMVEEAARHAEEAKKNAGEAETSARNAGISASQAEESAANADTSAGDASESARQAAESAAAAKQSEEASSSSASAAAQKASESSQSAADAELSKKTAESAAGNAARDATTATEKARESAESAQSAEQSRIAAEEAVNRIPTVVGPPGPKGEPGPAGPQGPKGDKGERGDTGPVGATGERGPAGDAGPAGPQGPKGDRGERGETGLTGNAGPQGPKGDTGAAGPAGPQGPKGETGAAGPVGATGPQGPKGDPGETQIRFRLGPASIIETNSHGWFPGTDGALITGLTFLAPKDTTRVQGFFQHLQVRFGDGPWQDVKGLDEVGSDTGRTGE

SEQ ID NO: 50 - protein, 437 aa, Escherichia coli
MTVKISGVLKDGTGKPVQNCTIVLKARRTSSTVVVNTVASENPDEAGRYSMDVEYGQYSVILLVEGFPPSHAGTITVYEDSQPGTLNDFLGAMSEDDVRPEALRRFELMVEEAARHAEEAKKNAGEAETSARNAGISASQAEENAANADTSAGDASESARQAAESAAAAKQSEEASSSSASAAAQKASESLQSATDAELSKKTAESAAGNAARDATTAAEKARESAESAQSAEQSRIAAEEAVNRIPTVVGPPGPKGEPGPAGPQGPKGDKGERGDTGPAGATGERGPAGDAGPAGPQGPKGDRGERGETGLTGNAGPQGPKGDTGAAGPAGPQGPKGETGAAGPVGATGPQGPKGDPGETQIRFRLGPASIIETNSHGWFPGTDGALITGLTFLAPKDTTRVQGFFQHLQVRFGDGPWQDVKGLDEVGSDTGRTGE

SEQ ID NO: 51 - protein, 438 aa, Escherichia coli
MAAVQISGVLKDGAGKPIQNCTIQLKARRNSTTVVVNTVASENPDEAGRYSMDVEYGQYSVTLLVEGFPPSHAGTISVYEDSQPGTLNDFLGAMTEDDARPEALRRFEQMVEEAARHAEEAKKNAGEAETSARNAGISASKAEASAANADTSAEDASESARQAAESAASAKKSEEASSSSASEAAQKASESLQSATDAELSKKTAESAAGNAARDATTATEKARESAESAQSAEQSRIAAEDAVNRIPTVVGPPGPKGEPGPAGPQGPKGDKGERGDTGPAGATGERGPGGDTGPAGPQGPKGDRGERGETGLTGSTGPQGPKGDTGATGPAGPQGPKGETGAAGPVGATGPQGAKGDPGETQIRFRLGPMRIIETNSYGWFPGTDGALITGLTFLDPKDATQVQGMFQHLQVRFGDGPWQDVKGLDEVGSDTGRTGE

SEQ ID NO: 52 - protein, 437 aa, Escherichia coli
MAVKISGVLKDGTGKPVENCTIQLKARRTSSTVVVNTVASENPDEAGRYSMDVEYGQYSVILLVEGFPPSHAGTITVYEDSQPGTLNDFLGAMSEDDVRPEALRRFELMVEEAARHAEEAKKNAGEAETSARNAGISSSKAEASAANADTSAGDASESARQAAESAAAAKQSEEASSSSASAAAQKASESSQSAAEAELSRKTAESAAGNAARDATTATEKARESAESARSAEQSRIAAEEAVNRIPTVVGPPGPKGEPGPAGPQGPKGDKGERGDTGPAGATGERGPAGDAGPAGPQGPKGDRGERGETGLTGNAGPQGPKGDTGAAGPAGPQGPKGETGAAGPVGATGPQGPKGDPGETQIRFRLGPGNIIETNSHGWFPDTDGALITGLTFLDPKDTTRVQGFFQHLQVRFGDGPWQDVKGLDEVGSDTGRTGE

SEQ ID NO: 53 - protein, 438 aa, Escherichia coli; identical to SEQ ID NO: 16

SEQ ID NO: 54 - protein, 405 aa, Escherichia coli
MVVNTVASENPDEAGRYSMDVEYGQYSVILLVEGFPPSHAGTITVYEDSQPGTLNDFLGAMSEDDVRPEALRRFELMVEEAARHAEEAKKNAGEAETSARNAGISASQAEESAANADTSAGDASESARQAAESAAAAKQSEEASSSSASAAAQKASESSQSAAEAELSRKTAESAAGNAARDATTATEKARESAESAQSAEQSRIAAEEAVNRIPTVVGPPGPKGEPGPAGPQGPKGDKGERGDTGPAGATGERGPAGDAGPAGPQGPKGDRGERGETGLTGNAGPQGPKGDTGAAGPAGPQGPKGETGAAGPVGATGPQGPKGDPGETQIRFRLGPGNIIETNSHGWFPDTDGALITGLTFLDPKDTTRVQGFFQHLQVRFGDGPWQDVKGLDEVGSDTGRTGE

SEQ ID NO: 55 - protein, 470 aa, Escherichia coli
MAVKISGVLKDGTGKPVENCTIQLKARRNSATVVVNTVASENPDEAGRYSMDVEYGQYSVILLVEGFPPSHAGTITVYEDSQPGTLNDFLGAMSEDDVRPEALRRFELMVEEAARHAEEAKKNAGEAETSARNAGISASQAEESAANADTSAGDASESARQAAESAAAAKQSEEASSSSASAAAQKASESLQSATDAELSKKTAESAAGNAARDATTAAEKARESAESAQSAEQSRIAAEEAVNRIPTVVGPPGPKGEPGPAGPQGPKGDKGERGDTGPAGATGERGPAGDAGPAGPQGPKGDRGERGDTGPAGATGERGPAGDAGPAGPQGPKGDRGERGETGLTGNAGPQGPKGDTGAAGPAGPQGPKGETGAAGPVGATGPQGPKGDPGETQIRFRLGPGNIIETNSNGWFPDTDGALITGLTFLDPKDATQVQGLFRHLQVRFGDGPWQDVKGLDEVGSDTGRTGE

SEQ ID NO: 56 - protein, 437 aa, Escherichia coli; identical to SEQ ID NO: 50

SEQ ID NO: 57 - protein, 437 aa, Escherichia coli
MAVKISGVLKDGTGKPVENCTIQLKARRNSATVVVNTVASENPDEAGRYSMDVEYGQYSVILLVEGFPPSHAGTITVYEDSQPGTLNDFLGAMSEDDVRPEALRRFELMVEEAARHAEEAKKNAGEAETSARNAGISASQAEESAANADTSAGDASESARQAAESAAAAKQSEEASSSSASAAAQKASESLQSATDAELSKKTAESAAGNAARDATTAAEKARESAESAQSAEQSRIAAEEAVNRIPTVVGPPGPKGEPGPAGPQGPKGDKGERGDTGPAGATGERGPAGDAGPAGPQGPKGDRGERGETGLTGNAGPQGPKGDTGAAGPAGPQGPKGETGAAGPVGATGPQGPKGDPGETQIRFRLGPGNIIETNSNGWFPDTDGALITGLTFLDPKDATQVQGLFRHLQVRFGDGPWQDVKGLNEVGSDTGRTGE

SEQ ID NO: 58 - protein, 437 aa, Escherichia coli
MAVKISGVLKDGTGKPVENCTIQLKARRNSATVVVNTVASENPDEAGRYSMDVEYGQYSVILLVEGFPPSHAGTITVYEDSQPGTLNDFLGAMSEDDVRPEALRRFELMVEEAARHAEEAKKNAGEAETSARNAGISASQAEESAANADTSAGDASESARQAAESAAAAKQSEEASSSSASAAAQKASESLQSATDAELSKKTAESAAGNAARDATTATEKARESAESAQSAEQSRIAAEEAVNRIPTVVGPPGPKGEPGPAGPQGPKGDKGERGDTGPAGATGERGPAGDAGPAGPQGPKGDRGERGETGLTGNAGPQGPKGDTGAAGPAGPQGPKGETGAAGPVGATGPQGPKGDPGETQIRFRLGPGNIIETNSNGWFPDTDGALITGLTFLAPKDATRVQVFFQHLQVRFGDGPWQDVKGLDEVGSDTGRTGE

SEQ ID NO: 59 - protein, 407 aa, Escherichia coli
MAVKISGVLKDGTGKPVENCTIQLKARRNSATVVVNTVASENPDEAGRYSMDVEYGQYSVILLVEGFPPSHAGTITVYEDSQPGTLNDFLGAMSEDDVRPEALRRFELMVEEAARHAEEAKKNAGEAETSARNAGISASQAEESAANADTSAGDASESARQAAESAAAAKQSEEASSSSASAAAQKASESLQSAADAELSKKTAESAAGNAARDATTATEKARESAESAQSAEQSRIAAEEAVNRIPTVVGPPGPKGEPGPAGPQGPKGDKGERGDTGPAGATGERGPAGDAGPAGPAGPAGPQGPKGETGAAGPVGATGPQGPKGDPGETQIRFRLGPGNIIETNSHGWFPDTDGALITGLTFLDPKDATRVQGFFQHLQVRFGDGPWQDVKGLDEVGSDTGRTGE

SEQ ID NO: 60 - protein, 405 aa, Escherichia coli
MVVNTVASENPDEAGRYSMDVEYGQYSVILLVEGFPPSHAGTITVYEDSQPGTLNDFLGAMSEDDVRPEALRRFELMVEEAARHAEEAKKNAGEAETSARNAGISASQAEESAANADTSAGEASESARQAAESAASAKQSEEASSSSASAAAQKASESSQSAAEAELSRKTAESAAGNAARDATTATEKARESAESAQSAEQSRIAAEEAVNRIPTVVGPPGPKGEQGPAGPQGPKGDKGERGDTGPVGATGERGPAGDAGPAGPQGPKGDRGERGETGLTGNAGPQGPKGDTGAAGPAGPQGPKGETGAAGPVGATGPQGPKGDPGETQIRFRLGPGNIIETNSHGWFPDTDGALITGLTFLDPKDATRVQGFFQHLQVRFGDGPWQDVKGLDEVGSDTGRTGE

SEQ ID NO: 61 - protein, 387 aa, Escherichia coli
MDVEYGQYSVILLVEGFPPSHAGTITVYEDSQPGTLNDFLGAMSEDDVRPEALRRFELMVEEVARHAEEAKKNAGEAETSARNAGISASQAEESAANADTSAGDASESARQAAESAAAAKQSEEASSSSASAAAQKASESLQSATDAELSKKTAESAAGNAARDATTAAEKARESAESAQSAEQSRIAAEEAVNRIPTVVGPPGPKGEPGPAGPQGPKGDKGERGDTGPAGATGERGPAGDAGPAGPQGPKGDRGERGETGLTGNAGPQGPKGDTGAAGPAGPQGPKGETGAAGPVGATGPQGPKGDPGETQIRFRLGPGNIIETNSNGWFPDTDGALITGLTFLDPKDATRVQGFFQHLQVRFGDGPWQDVKGLDEVGSDTGRTGE

SEQ ID NO: 62 - protein, 405 aa, Escherichia coli
MVVNTVASENPDEAGRYSMDVEYGQYSVILLVEGFPPSHAGTITVYEDSQPGTLNDFLGAMSEDDVRPEALRRFELMVEEVARHAEEAKKNAGEAETSARNAGISVSQAEASAANADTSAGEASESARQAAESAASAKKSEDASSSSASAAAQKASESSQSAAEAELSRKTAESAAGNAARDATTATEKARESAESAQSAEQSRIAAEEAVNRIPTVVGPPGPKGEQGPAGPQGPKGDKGERGDTGPVGATGERGPAGDAGPAGPQGPKGDMGERGETGLTGDAGPQGPKGDTGTAGPAGPQGPKGETGAAGPVGATGPQGPKGDPGETQIRFRLGPGNIIETNSNGWFPDTDGALITGLTFLDPKDATRVQGLFQHLQVRFGDGPWQDVKGLDEVGSDTGRTGE

SEQ ID NO: 63 - protein, 400 aa, Escherichia coli
MASENPDEAGRYSMDVEYGQYSVILLVEGLPPSHAGTITVYEDSQPGTLNDFLGAMSEDDVRPEALRRFELMVEEAARHAEEAKKNAGEAETSARNAGISASQAEENAANADTSAGDASESARQAAESAAAAKQSEEASSSSASAAAQKASESSQSAAEAELSRKTAESAAGNAVRDATTATEKARESAESAQSAEQSRIAAEEAVNRIPTVVGPPGPKGEQGPAGPQGPKGDKGERGDTGPAGATGERGPAGDAGPAGPQGPKGDRGERGETGLTGNAGPQGPKGDTGAAGPAGPQGPKGETGAAGPVGATGPQGPKGDPGETQIRFRLGPGNIIETNSHGWFPDTDGALITGLTFLDPKDATRVQGFFQHLQVRFGDGPWQDVKGLDEVGSDTGRTGE

SEQ ID NO: 64 - protein, 437 aa, Escherichia coli
MTVKISGVLKDGTGKPVQNCTIVLKARRTSSTVVVNTVASENPDEAGRYSMDVEHGQYSVTLLVEGFPPSHAGTITVYEDSRPGTLNDFLGAMTEDDARPEALRRFELMVEEVVRNAEEAKKNAGEAETSARNAGISASQAEESAANADTSAGEASESARQAAESAASAKQSEDASSSSASAAAQKASESSQSAADAELSRKTAESAAGNAARDATTAAEKARESAESAQSAEQSRIAAEDAVNRIPTVVGPPGPKGEQGPAGPQGPKGDKGERGDTGPVGATGERGPAGDAGPAGPQGPKGDRGERGETGLTGNAGPQGPKGDTGAAGPAGPQGPKGETGAAGPVGATGPQGPKGDPGETQIRFRLGPGNIIETNSHGWFPDTDGALITGLTFLDPKDTTRVQGFFRHLQVRFGDGPWQDVKGLDEVGSDTGRTGE

SEQ ID NO: 65 - protein, 437 aa, Escherichia coli
MAVKISGVLKDGTGKPVQNCTIQLKAKRNSSTVVVNTLASENPDEAGRYSMDVEYGQYSVILLVEGFPPSHAGTITVYEDSQPGTLNDFLGAMSEDDVRPEALRRFELMVEEAARHAEEAKKNAGEAETSARNAGISASQAEESAANADTSAGDASESARQAAESAASAKQSEDASSSSASAAAQKASESLQSATDAELSKKMAESAAGNAARDATTATEKARESAESAQSAEQSRIAAEEAVNRIPTVVGPPGPKGEQGPAGPQGPKGDKGERGDTGPVGATGERGPAGDAGPAGPQGPKGDRGERGETGLTGNAGPQGPKGDTGAAGPAGPQGPKGETGAAGPVGATGPQGPKGDPGETQIRFRLGPASIIETNSNGWFPDTDGALITGLTFLDPKDATQVQGLFQHLQVRFGDGPWQDVKGLNEVGSDTGRTGE

SEQ ID NO: 66 - protein, 437 aa, Escherichia coli
MAVKISGVLKDGTGKPIQNCTIQLKARRNSTTVVVNTVASENPDEAGRYSMDVEYGQYSVTLLVEGFPPSHAGTITVYEDSQPGTLNDFLGAMSEDDVRPEAMRRFELMVEEAARHAEEAKKNAGEAETSARNAGISASQAEESAANADTSAGDASESARQAAESAAAAKQSEEASSSSASAAAQKASESSQSAADAELSRKTAESAAGNAARDATTATEKARESAESAQSAEQSRIAAEEAVNRIPTVVGPPGPKGEQGPAGPQGPKGDKGERGDTGPVGATGERGPAGDAGPAGPQGPKGDRGERGETGLTGNAGPQGPKGDTGAAGPAGPQGPKGETGAAGPVGATGPQGPKGDPGETQIRFRLGPASIIETNSNGWFPGTDGALITGLTFLDPKDATQVQGLFQHLQVRFGDGPWQDVKGLDEVGSDTGRTGE

SEQ ID NO: 67 - protein, 439 aa, Escherichia coli
MNMAVKISGVLKDGTGKPIQNCTIQLKARRNSTTVVVNTVASENPDEAGRYSMDVEYGQYSVTLLVEGFPPSHAGTITVYEDSQPGTLNDFLGAMSEDDVRPEAMRRFELMVEEAARHAEEAKKNAGEAETSARNAGISASQAEESAANADTSAGDASESARQAAESAAAAKQSEEASSSSASAAAQKASESSQSAADAELSRKTAESAAGNAARDATTATEKARESAESAQSAEQSRIAAEEAVNRIPTVVGPPGPKGEQGPAGPQGPKGDKGERGDTGPVGATGERGPAGDAGPAGPQGPKGDRGERGETGLTGNAGPQGPKGDTGAAGPAGPQGPKGETGAAGPVGATGPQGPKGDPGETQIRFRLGPASIIETNSNGWFPGTDGALITGLTFLDPKDATQVQGLFQHLQVRFGDGPWQDVKGLDEVGSDTGRTGE

SEQ ID NO: 68 - protein, 437 aa, Escherichia coli
MAVKISGVLKDGTGKPVQNCTIQLKARRNSTTVVVNTVASENPDEAGRYSMDVEYGQYSVSLLVEGFPPSHAGIITVYEDSKPGTLNDFLGAMTEDDVRPEALRRFELMVEEVARHAEEAKKNAGEAETSARNAGISASQAEESAANADTSAGDASESARQAAESAASAKQSEDASSSSASAAAQKASESSQSAAEAELSRKTAESAAGNAARDATTATEKARESAESAQSAEQSRIAAEEAVNRIPTVVGPPGPKGEQGPAGPQGPKGDKGERGDTGPVGATGERGPAGDAGPAGPQGPKGDRGERGETGLTGNAGPQGPKGDTGAAGPAGPQGPKGETGAAGPVGATGPQGPKGDPGETQIRFRLGPASIIETNSNGWFPDTDGALITGLTFLDPKDATQVQGLFRHLQVRFGDGPWQDVKGLDEVGSDTGRTGE

SEQ ID NO: 69 - protein, 438 aa, Escherichia coli; identical to SEQ ID NO: 16

SEQ ID NO: 70 - protein, 439 aa, Escherichia coli; identical to SEQ ID NO: 26

SEQ ID NO: 71 - protein, 437 aa, Escherichia coli
MAVKISGVLKDGTGKPVENCTIQLKARRTSSTVVVNTVASENPDEAGRYSMDVEYGQYSVILLVEGFPPSHAGTITVYEDSQPGTLNDFLGAMSEDDVRPEALRRFELMVEEAARHAEEAKKNAGEAETSARNAGISASQAEESAANADTSAGDASESARQAAESAAAAKQSEEASSSSASAAAQKASESLQSATDAELSKKTAESAAGNAARDATTAAEKARESAESAQSAEQSRIAAEEAVNRIPTVVGPPGPKGEPGPAGPQGPKGDKGERGDTGPAGATGERGPAGDAGPAGPQGPKGDRGERGETGLTGNAGPQGPKGDTGAAGPAGPQGPKGETGAAGPVGATGPQGPKGDPGETQIRFRLGPGNIIETNSNGWFPDTDGALITGLTFLDPKDTTQVQGLFRHLQVRFGDGPWQDVKGLNEVGSDTGRTGE

SEQ ID NO: 72 - protein, 451 aa, Escherichia coli; identical to SEQ ID NO: 23

SEQ ID NO: 73 - protein, 437 aa, Escherichia coli; identical to SEQ ID NO: 8

SEQ ID NO: 74 - protein, 434 aa, Escherichia coli; identical to SEQ ID NO: 13

SEQ ID NO: 75 - protein, 437 aa, Escherichia coli; identical to SEQ ID NO: 4

SEQ ID NO: 76 - protein, 407 aa, Escherichia coli; identical to SEQ ID NO: 5

SEQ ID NO: 77 - protein, 389 aa, Escherichia coli
MAVKISGVLKDGTGKPVENCTIQLKARRNSATVVVNTVASENPDEAGRYSMDVEYGQYSVILLVEGFPPSHAGTITVYEDSQPGTLNDFLGAMSEDDVRPEALRRFELMVEEVARHAEEAKKNAGEAETSARNAGISASQAEESAANADTSAGEASESARQAAESAASAKQSEEASSSSASAAAQKASESSQSAAEAELSRKTAESAAGNAARDATTATEKARESAESAQSAEQSRIAAEEAVNRIPTVVGPPGPKGEQGPAGPQGPKGDKGERGDTGPVGATGERGPKGETGAAGPVGATGPQGPKGDPGETQIRFRLGPGNIIETNSNGWFPDTDGALITGLTFLDPKDATRVQGFFQHLQVRFGDGPWQDVKGLDEVGSDTGRTGE

SEQ ID NO: 78 - protein, 437 aa, Escherichia coli
MAVKISGVLKDGTGKPVENCTIQLKARRTSSTVVVNTVASENPDEAGRYSMDVEYGQYSVILLVEGFPPSHAGTITVYEDSQPGTLNDFLGAMSEDDVRPEALRRFELMVEEVARHAEEAKKNAGEAETSARNAGISASQAEESAANADTSAGDASESARQAAESAAAAKQSEEASSSSASAAAQKASESLQSATDAELSKKTAESAAGNAARDATTAAEKARESAESAQSAEQSRIAAEEAVNRIPTVVGPPGPKGEPGPAGPQGPKGDKGERGDTGPVGATGERGPRGDTGPAGPQGPKGDRGERGETGLTGNAGPQGPKGDTGAAGPAGPQGPKGETGAAGPVGATGPQGPKGDPGETQIRFRLGPGNIIETNSNGWFPDTDGALITGLTFLDPKDATQVQGLFRHLQVRFGDGPWQDVKGLNEVGSDTGRTGE

SEQ ID NO: 79 - protein, 437 aa, Escherichia coli
MAVKISGVLKDGTGKPVENCTIQLKARRNSATVVVNTVASENPDEAGRYSMDVEYGQYSVILLVEGFPSSHAGTITVYEDSQPGTLNDFLGAMSEDDVRPEALRRFELMVEEAARHAEEAKKNAGEAETSARNAGISASQAEESAANADTSAGEASESARQAAESAASAKQSEDASSSSASAAAQKASESSQSAAEAELSRKTAESAAGNAARDATTATEKARESAESAQSAEQSRIAAEEAVNRIPTVVGPPGPKGEQGPAGPQGPKGDKGERGDTGPVGATGERGPAGDAGPAGPQGPKGDRGERGETGLTGNAGPQGPKGDTGAAGPAGPQGPKGETGAAGPVGATGPQGPKGDPGETQIRFRLGPASIIETNSNGWFPDTDGALITGLTFLDPKDATQVQGLFRHLQVRFGDGPWQDVKGLDEVGSDTGRTGE

SEQ ID NO: 80 - protein, 438 aa, Escherichia coli; identical to SEQ ID NO: 48

SEQ ID NO: 81 - protein, 407 aa, Escherichia coli; identical to SEQ ID NO: 5

SEQ ID NO: 82 - protein, 437 aa, Escherichia coli; identical to SEQ ID NO: 50

SEQ ID NO: 83 - protein, 437 aa, Escherichia coli
MAVKISGVLKDGTGKPVQNCTIQLKAKRNSTTVVVNTVASENPDEAGRYSMDVEYGQYSVTLLVEGFPPSHAGTITVYEDSQPGTLNDFLGAMSEDDVRPEALRRFEQMVEEAARHAGEAKKNAGEAETSARNAGISASQAEESAANADTSAGEASESARQAAESAAAAKKSEEASSSSASEAAQKASESLQSAADAELSKKTAESAAGNAARDATTAAEKARESAESAQSAEQSRIAAEDAVNRIPTVVGPPGPKGEPGPAGPQGPKGDKGERGDTGPVGATGERGPAGDAGPAGPQGPKGDRGERGETGLTGNAGPQGPKGDTGAAGPAGPQGPKGETGAAGPVGATGPQGPKGDPGETQIRFRLGPASIIETNSNGWFPGTDGALITGLTFLDPKDATQVQGLFQHLQVRFGDGPWQDVKGLDEVGSDTGRTGE

SEQ ID NO: 84 - protein, 437 aa, Escherichia coli
MAVKISGVLKDGTGKPVQNCTIQLKAKRNSTTVVVNTVASENPDEAGRYSMDVEYGQYSVTLLVEGFPPSHAGTITVYEDSQPGTLNDFLGAMSEDDVRPEALRRFEQMVEEAARHAGEAKKNAGEAETSARNAGISASQAEESAANADTSAGEASESARQAAESAAAAKKSEEASSSSASEAAQKASESLQSAADAELSKKTAESAAGNAARDATTAAEKARESAESAQSAEQSRIAAEDAVNRIPTVVGPPGPKGEPGPAGPQGPKGDKGERGDTGPVGATGERGPAGDAGPAGPQGPKGDRGERGETGLTGNAGPQGPKGDTGAAGPAGPQGPKGETGAAGPVGATGPQGPKGDPGETQIRFRLGPASIIETNSNGWFPDTDGALITGLTFLDPKDATQVQGLFQHLQVRFGDGPWQDVKGLDEVGSDTGSSGE

SEQ ID NO: 85 - protein, 425 aa, Escherichia coli
MTVKISGVLKDGTGKPVQNCTIVLKARRTSSTVVVNTVASENPDEAGRYSMDVEHGQYSVTLLVEGFPPSHAGTITVYEGSRPGTLNDFLGAMTEDDVRPEALRRFELMVEEAARHAEEAKKNAGEAETSARNAGISASQAEESAANADTSAGDASESARQAAESAAAAKQSEEASSSSASAAAQKASESSQSAADAELSKKTAESAAGNAARDATTATEKARESAESAQSAEQSRIAAEEAVNRIPTVVGPPGPKGEPGPADPQGPKGDKGERGDTGPAGATGERGPKGDRGERGETGLTGNAGPQGPKGDTGAAGPAGPQGPKGETGAAGPVGATGPQGPKGDPGETQIRFRLGPGNIIETNSNGWFPDTDGALITGLTFLDPKDATRVQGFFQHLQVRFGDGPWQDVKGLDEVGSDTGRTGE

SEQ ID NO: 86 - protein, 451 aa, Escherichia coli; identical to SEQ ID NO: 23

SEQ ID NO: 87 - protein, 434 aa, Escherichia coli; identical to SEQ ID NO: 13

SEQ ID NO: 88 - protein, 437 aa, Escherichia coli; identical to SEQ ID NO: 7

SEQ ID NO: 89 - protein, 437 aa, Escherichia coli; identical to SEQ ID NO: 4

SEQ ID NO: 90 - protein, 407 aa, Escherichia coli; identical to SEQ ID NO: 5

SEQ ID NO: 91 - protein, 437 aa, Escherichia coli; identical to SEQ ID NO: 12

SEQ ID NO: 92 - protein, 437 aa, Escherichia coli; identical to SEQ ID NO: 11

SEQ ID NO: 93 - protein, 437 aa, Escherichia coli; identical to SEQ ID NO: 8

SEQ ID NO: 94 - protein, 437 aa, Escherichia coli; identical to SEQ ID NO: 6

SEQ ID NO: 95 - protein, 438 aa, Escherichia coli; identical to SEQ ID NO: 16

SEQ ID NO: 96 - protein, 404 aa, Escherichia coli; identical to SEQ ID NO: 1

SEQ ID NO: 97 - protein, 437 aa, Escherichia coli
MAVKISGVLKDGTGKPVENCTIQLKARRTSSTVVVNTVASENPDEAGRYSMDVEYGQYSVILLVEGFPPSHAGTITVYEDSQPGTLNDFLGAMSEDDVRPEALRRFELMVEEAARHAEEAKKNAGEAETSARNAGISASKAEASAANADTSAEDASESARQAAESAAAAKQSEEASSSSASAAAQKASESLQSAAEAELSRKTAESAAGNAARDATTATEKARESAESAQSAEQSRIAAEEAVNRIPTVVGPPGPKGEQGPAGPQGPKGDKGERGDTGPVGATGERGPAGDAGPAGPQGPKGDRGERGETGLTGNAGPQGPKGDTGAAGPAGPQGPKGETGAAGPVGATGPQGPKGDPGEAQIRFRLGPGNIIETNSNGWFPDTDGALITGLTFLAPKDATRVQGFFQHLQVRFGDGPWQDVKGLDEVGSDTGRTGE

SEQ ID NO: 98 - protein, 437 aa, Escherichia coli
MAVKISGVLKDGTGKPVENCTIQLKARRTSSTVVVNTVASENPDEAGRYSMDVEYGQYSVILLVEGFPPSHAGTITVYEDSQPGTLNDFLGAMSEDDVRPEALRRFELMVEEAARHAEEAKKNAGEAETSARNAGISASQAEESAANADTSAGDASESARQAVESAASAKQSEEASSSSASAAAQKASESSQSAAEAELSRKTAESAAGNAARDATTATEKARESAESAQSAEQSRIAAEEAVNRIPTVVGPPGPKGEQGPAGPQGPKGDKGERGDTGPVGATGERGPAGDAGPAGPQGPKGDRGERGETGLTGNAGPQGPKGDTGAAGPAGPQGPKGETGAAGPVGATGPQGPKGDPGEAQIRFRLGPGNIIETNSNGWFPDTDGALITGLTFLAPKDATRVQGFFQHLQVRFGDGPWQDVKGLDEVGSDTGRTGE

SEQ ID NO: 99 - protein, 437 aa, Escherichia coli
MAVKISGVLKDGTGKPVQNCTIQLKAKRNSTTVVVNTLASENPDEAGRYSMDVEYGQYSVILLVEGFPPSHAGTITVYEDSQPGTLNDFLGAMTEDDARPEALRRFEQMVEEAARHAEEAKKNAGEAETSARNAGISASKAEASAANADTSAEDASESARQAAESAASAKKSEEASSSSASEAAQKASESLQSATDAELSKKTAESAAGNASRDATTATEKARESAESAQSAEQSRIAAEEAVNRIPTVVGPPGPKGDPGPAGPQGPKGDKGERGDTGPAGATGERGPAGDAGPAGPQGPKGDRGERGETGLTGNAGPQGPKGDTGAAGPAGPQGPKGETGAAGPVGATGPQGPKGDPGETQIRFRLGPASIIETNSNGWFPGTDGALITGLTFLDPKDATQVQGLFQHLQVRFGDGPWQDVKGLDEVGSDTGRTGE

SEQ ID NO: 100 - protein, 440 aa, Escherichia coli
MAVKISGVLKDGTGKPVENCTIQLKARRTSSTVVVNTVASENPDEAGRYSMDVEYGQYSVILLVEGFPPSHAGTITVYEDSQPGTLNDFLGAMSEDDVRPEALRRFELMVEEVARHAEEAKKNAGEAETSARNAGISASQAEESAANADTSAGEASESARQAAESAASAKQSEDASSSSASAAAQKASESSQSAAEAELSRKTAESAAGNAARDATTATEKARESAESAQSAEQSRIAAEEAVNRIPTVVGPPGPKGEPGPAGPQGPKGDKGERGDTGPVGATGERGPAGDAGPAGPQGPKGDRGERGETGLTGNAGPQGPKGDTGAAGPAGPAGPQGPKGETGAAGPVGATGPQGPKGDPGETQIRFRLGPASIIETNSNGWFPGTDGALITGLTFLDPKDATQVQGLFQHLQVRFGDGPWQDVKGLDEVGSDTGRTGE

SEQ ID NO: 101 - protein, 437 aa, Escherichia coli
MAVKISGVLKDGTGKPVENCTIQLKARRTSSTVVVNTVASENPDEAGRYSMDVEYGQYSVILLVEGFPPSHAGTITVYEDSQPGTLNDFLGAMSEDDVRPEALRRFELMLEEAARHAEEAKKNAGEAETSARNAGISASQAEESAANADTSAGDASESARQAAESAAAAKQSEEASSSSASAAAQKASESSQSAAEAELSRKTAESAAGNAARDATTATEKARESAESAQSAEQSRIAAEEAVNRIPTVVGPPGPKGEQGPAGPQGPKGDKGERGDTGPVGATGERGPAGDAGPAGPQGPKGDRGERGETGLTGNAGPQGPKGDTGAAGPAGPQGPKGETGAAGPVGATGPQGPKGDPGETQIRFRLGPASIIETNSNGWFPDTDGALITGLTFLDPKDATQVQGLFRHLQVRFGDGPWQDVKGLDEVGSDTGRTGE

SEQ ID NO: 102 - protein, 437 aa, Escherichia coli
MAVKISGVLKDGTGKPVENCTIQLKARRTSSTVVVNTVASENPDEAGRYSMDVEYGQYSVILLVEGFPPSHAGTITVYEDSQPGTLNDFLGAMSEDDVRPEALRRFELMVEEVARHAEEAKKNAGEAETSARNAGISASQAEESAANADTSAGEASESARQAAESAASAKQSEDASSSSASAAAQKASESSQSAAEAELSRKTAESAAGNAARDATTATEKARESAESAQSAEQSRIAAEEAVNRIPTVVGPPGPKGEPGPAGPQGPKGDKGERGDTGPVGATGERGPAGDAGPAGPQGPKGDRGERGETGLTGNAGPQGPKGDTGAAGPAGPQGPKGETGAAGPVGATGPQGPKGDPGETQIRFRLGPASIIETNSHGWFPDTDGALITGLTFLDPKDATRVQGFFQHLQVRFGDGPWQDVKGLDEVGSDTGRTGE

SEQ ID NO: 103 - protein, 437 aa, Escherichia coli
MAVKISGVLKDGTGKPVENCTIQLKARRTSSTVVVNTVASENPDEAGRYSMDVEYGQYSVILLVEGFPPSHAGTITVYEDSQPGTLNDFLGAMSEDDVRPEALRRFELMLEEAARHAEEAKKNAGEAETSARNAGISASQAEESAAHADTSAGDASESARQAAESAAAAKQSEEASSSSASAAAQKASESSQSAAEAELSRKTAESAAGNAARDATTATEKARESAESAQSAEQSRIAAEEAVNRIPTVVGPPGPKGEQGPAGPQGPKGDKGERGDTGPVGATGERGPAGDAGPAGPQGPKGDRGERGETGLTGNAGPQGPKGDTGAAGPAGPQGPKGETGAAGPVGATGPQGPKGDPGETQIRFRLGPASIIETNSNGWFPDTDGALITGLTFLDPKDATQVQGLFRHLQVRFGDGPWQDVKGLDEVGSDTGRTGE

SEQ ID NO: 104 - protein, 437 aa, Escherichia coli
MAVKISGVLKDGTGKPVENCTIQLKARRTSSTVVVNTVASENPDEAGRYSMDVEYGQYSVILLVEGFPPSHAGTITVYEDSQPGTLNDFLGAMSEDDVRPEALRRFELMVEEVARHAEEAKKNAGEAETSARNAGISASQAEESAANADTSAGEASESARQAAESAASAKQSEDASSSSASAAAQKASESSQSAAEAELSRKTAESAAGNAARDATTATEKARESAESAQSAEQSRIAAEEAVNRIPTVVGPPGPKGEQGPAGPQGPKGDKGERGDTGPVGATGERGPAGDAGPAGPQGPKGDRGERGETGLTGNAGPQGPKGDTGAAGPAGPQGPKGETGAAGPVGATGPQGPKGDPGETQIRFRLGPASIIETNSNGWFPDTDGALITGLTFLDPKDATQVQGLFRHLQVRFGDGPWQDVKGLDEVGSDTGRTGE

SEQ ID NO: 105 - protein, 437 aa, Escherichia coli
MAVKISGVLKDGTGKPVENCTIQLKARRTSSTVVVNTVASENPDEAGRYSMDVEYGQYSVILLVEGFPPSHAGTITVYEDSQPGTLNDFLGAMSEDDVRPEALRRFELMVEEVARHAEEAKKNAGEAETSARNAGISASQAEEGAANADTSAGEASESARQAAESAAAAKQSEEASSSSASAAAQKASESSQSAAEAELSRKTAESAAGNAARDATTATEKARESAESAQSAEQSRIAAEEAVNRIPTVVGPPGPKGEPGPAGPQGPKGDKGERGDTGPAGATGERGPRGDTGPAGPQGPKGDRGERGETGLTGDAGPQGPKGDTGAAGPAGPQGPKGETGAAGPVGATGPQGPKGDPGETQIRFRLGPASIIETNSNGWFPDTDGALITGLTFLDPKDATRVQGFFQHLQVRFGDGPWQDVKGLDEVGSDTGRTGE

SEQ ID NO: 106 - protein, 437 aa, Escherichia coli
MAVKISGVLKDGTGKPVENCTIQLKARRTSSTVVVNTVASENPDEAGRYSMDVEYGQYSVILLVEGFPPSHAGTITVYEDSQPGTLNDFLGAMSEDDVRPEALRRFELMVEEVARHAEEAKKNAGEAETSARNAGISASQAEESAANADTSAGEASESARQAAESAASAKQSEEASSSSASAAAQKASESSQSAAEAELSRKTAESAAGNAARDATTATEKARESAESAQSAEQSRIAAEEAVNRIPTVVGPPGPKGEQGPAGTQGPKGDKGERGDTGPVGATGERGPAGDAGPAGPQGPKGDRGERGETGLTGNAGPQGPKGDTGAAGPAGPQGPKGETGAAGPVGATGPQGPKGDPGETQIRFRLGPASIIETNSNGWFPGTDGALITGLTFLDPKDATQVQGMFQHLQVRFGDGPWQDVKGLDEVGSDTGRTGE

SEQ ID NO: 107 - protein, 437 aa, Escherichia coli
MAVKISGVLKDGTGKPVENCTIQLKARRTSSTVVVNTVASENPDEAGRYSMDVEYGQYSVILLVEGFPPSHAGTITVYEDSQPGTLNDFLGAMSEDDVRPEALRRFELMVEEAARHAEEAKKNAGEAETSARNAGISSSKAEASAANADTSAGDASESARQAAESAAAAKQSEEASSSSASAAAQKASESSQSAAEAELSRKTAESAAGNAARDATTATEKARESAESARSAEQSRIAAEEAVNRIPTVVGPPGPKGEPGPAGPQGPKGDKGERGDTGPVGATGERGPAGDAGPAGPQGPKGDMGERGETGLTGNAGPQGPKGDTGAAGPAGPQGPKGETGAAGPVGATGPQGPKGDPGETQIRFRLGPASIIETNSNGWFPGTDGALITGLTFLDPKDATQVQGLFQHLQVRFGDGPWQDVKGLDEVGSDTGRTGE

SEQ ID NO: 108 - protein, 437 aa, Escherichia coli
MAVKISGVLKDGTGKPVENCTIQLKARRTSSTVVVNTVASENPDEAGRYSMDVEYGQYSVILLVEGFPPSHAGTITVYEDSQPGTLNDFLGAMTEDDARPEALRRFELMVEEVARHAEEAKKNAGEAETSARNAGISASQAEESAANADTSAGEASESARQAAESAASAKQSEDASSSSASAAAQKASESSQSAAEAELSRKTAESAAGNAARDATTATEKARESAESAQSAEQSRIAAEEAVNRIPTVVGPPGPKGEQGPAGPQGPKGDKGERGDTGPVGATGERGPAGDAGPAGPQGPKGDRGERGETGLTGNAGPQGPKGDTGAAGPAGPQGPKGETGAAGPVGATGPQGPKGDPGETQIRFRLGPASIIETNSHGWFPDTDGALITGLTFLDPKDATQVQGLFRHLQVRFGDGPWQDVKGLDEVGSDTGRTGE

SEQ ID NO: 109 - protein, 437 aa, Escherichia coli; identical to SEQ ID NO: 3

SEQ ID NO: 110 - protein, 437 aa, Escherichia coli
MAVKISGVLKDGTGKPVENCTIQLKARRTSSTVVVNTVASENPDEAGRYTMDVEYGQYSVILLVEGFPPSHAGTITVYEDSQPGTLNDFLGAMSEDDVRPEALRRFELMVEEAARHAEEAKKNAGEAETSARNAGISASQAEESAANADTSAGEASESARQAAESAAAAKQSEEASSSSASAAAQKASESSQSAAEAELSRKTAESAAGNAARDATTATEKARESAESAQSAEQSRIAAEEAVNRIPTVVGPPGPKGEPGPAGPQGPKGDKGERGDTGPAGATGERGPRGDTGPAGPQGPKGDRGERGETGLTGDAGPQGPKGDTGAAGPAGPQGPKGETGAAGPVGATGPQGPKGDPGETQIRFRLGPASIIETNSNGWFPGTDGALITGLTFLDPKDATQVQGLFQHLQVRFGDGPWQDVKGLDEVGSDTGRTGE

SEQ ID NO: 111 - protein, 437 aa, Escherichia coli
MAVKISGVLKDGTGKPVENCTIQLKARRTSSTVVVNTVASENPDEAGRYTMDVEYGQYSVILLVEGFPPSHAGTITVYEDSQPGTLNDFLGAMSEDDVRPEALRRFELMVEEAARHAEEAKKNAGEAETSARNAGISASQAEESAANADTSAGEASESARQAAESAAAAKQSEEASSSSASAAAQKASESSQSAAEAELSRKTAESAAGNAARDATTATEKARESAESAQSAEQSRIAAEEAVNRIPTVVGPPGPKGEPGPAGPQGPKGDKGERGDTGPAGATGERGPRGDTGPAGPQGPKGDRGERGETGLTGDAGPQGPKGDTGAAGPAGPQGPKGETGAAGPVGATGPQGPKGDPGETQIRFRLGPASIIETNSNGWFPDTDGALITGLTFLDPKDATRVQGFFQHLQVRFGDGPWQDVKGLDEVGSDTGRTGE

SEQ ID NO: 112 - protein, 437 aa, Escherichia coli; identical to SEQ ID NO: 52

SEQ ID NO: 113 - protein, 437 aa, Escherichia coli
MAVKISGVLKDGTGKPVENCTIQLKARRTSSTVVVNTVASENPDEAGRYSMDVEYGQYSVILLVEGFPPSHAGTITVYEDSRPGTLNDFLGAMSEDDVRPEALRRFELMVEEAARHAGEAKKNAGEAETSARNAGISASQAEENAANADTSAGDASESARQAAESAAAAKQSEEASSSSASAAAQKASESSQSAAEAELSRKTAESAAGNAARDATTATEKARESAESAQSAEQSRIAAEEAVNRIPTVVGPPGPKGEQGPAGPQGPKGDKGERGDTGPVGATGERGPAGDAGPAGPQGPKGDRGERGETGLTGNAGPQGPKGDTGAAGPAGPQGPKGETGAAGPVGATGPQGPKGDPGEAQIRFRLGPASIIETNSNGWFPDTDGALITGLTFLDPKDATQVQGLFRHLQVRFGDGPWQDVKGLDEVGSDTGRTGE

SEQ ID NO: 114 - protein, 437 aa, Escherichia coli
MAVKISGVLKDGTGKPVENCTIQLKARRTSSTVVVNTVASENPDEAGRYSMDVEYGQYSVILLVEGFPPSHAGTITVYEDSRPGTLNDFLGAMTEGDVRPEALRRFELMVEEVARHAEEAKKNAGEAETSARNAGISASQAEESAANADTSAGEASESARQAAESAAAAKQSEDASSSSASAAAQKASESSQSAAEAELSKKTAESAAGNAARDATTATEKARESAESAQSAEQSRIAAEEAVNRIPTVVGPPGPKGEQGPAGPQGPKGDKGERGDTGPVGATGERGPAGDAGPAGPQGPKGDRGERGETGLTGNAGPQGPKGDTGAAGPAGPQGPKGETGAAGPVGATGPQGPKGDPGETQIRFRLGPGNIIETNSHGWFPDTDGALITGLTFLDPKDATQVQGLFRHLQVRFGDGPWQDVKGLNEVGSDTGRTGE

SEQ ID NO: 115 - protein, 437 aa, Escherichia coli
MAVKISGVLKDGTGKPVENCTIQLKARRTSSTVVVNTVASENPDEAGRYSMDVEYGQYSVILLVEGFPPSHAGTITVYEDSRPGTLNDFLGAMTEGDVRPEALRRFELMVEEVARHAEEAKKNAGEAETSARNAGISASQAEESAANADTSAGDASESARQAAESAAAAKQSEEASSSSASAAAQKASESSQSAAEAELSRKTAESAAGNAARDATTATEKARESAESAQSAEQSRIAAEEAVNRIPTVVGPPGPKGEQGPAGPQGPKGDKGERGDTGPVGATGERGPAGDAGPAGPQGPKGDRGERGETGLTGNAGPQGPKGDTGAAGPAGPQGPKGETGAAGPVGATGPQGPKGDPGETQIRFRLGPGNIIETNSHGWFPDTDGALITGLTFLDPKDATQVQGLFRHLQVRFGDGPWQDVKGLNEVGSDTGRTGE

SEQ ID NO: 116 - protein, 437 aa, Escherichia coli; identical to SEQ ID NO: 2

SEQ ID NO: 117 - protein, 437 aa, Escherichia coli
MAVKISGVLKDGTGKPVENCTIQLKARRTSSTVVVNTVASENPDEAGRYSMDVEYGQYSVILLVEGFPPSHAGTITVYEDSQPGTLNDFLGAMSEDDVRPEALRRFELMVEEVARHAEEAKKNAGEAETSARNAGISVSQAEASAANADTSAGEASESARQAAESAASAKKSEDASSSSASAAAQKASESSQSAAEAELSRKTAESAAGNAARDATTATEKARESAESAQSAEQSRIAAEEAVNRIPTVVGPPGPKGEQGPAGPQGPKGDKGERGDTGPVGATGERGPAGDAGPAGPQGPKGDRGEQGKTGLTGDAGPQGPKGDTGTAGPAGPQGPKGETGAAGPVGATGPQGPKGDPGETQIRFRLGPGNIIETNSNGWFPDTDGALITGLTFLDPKDATRVQGFFQHLQVRFGDGPWQDVKGLDEVGSDTGRTGE

SEQ ID NO: 118 - protein, 440 aa, Escherichia coli
MAVKISGVLKDGTGKPVENCTIQLKARRSSSTVVVNTVASENPDEAGRYSMDVEYGQYSVILLVEGFPPSHAGTITVYEDSQPGTLNDFLGAMSEDDVRPEALRRFELMVEEVARHAEEAKKNAGEAETSARNAGISASQAEESAANADTSAGEASESARQAAESAASAKQSEDASSSSASAAAQKASESSQSAADAELSKKTAESAAGNAARDATTATEKARESAESAQSAEQSRIAAEEAVNRIPTVVGPPGPKGEQGPAGPQGPKGDKGERGDTGPVGATGERGPAGDAGPAGPQGPKGDRGERGETGLTGNAGPQGPKGDTGAAGPAGSAGPQGPKGETGAAGPVGATGPQGPKGDPGETQIRFRLGPGNIIETNSHGWFPDTDGALITGLTFLAPKDATRVQGFFQHLQVRFGDGPWQDVKGLDEVGSDTGRTGE

SEQ ID NO: 119 - protein, 437 aa, Escherichia coli
MAVKISGVLKDGTGKPVENCTIQLKARRTSSTVVVNTVASENPDEAGRYSMDVEYGQYSVILLVEGFPPSHAGTITVYEDSQPGTLNDFLGAMSEDDVRPEALRRFELMVEEAARHAEEAKKNAGEAETSARNAGISASQAEESAANADTSAGDASESARQAAESAAAAKQSEEASSSSASAAAQKASESSQSAAEAELSRKTAESAAGNAARDATTATEKARESAESAQSAEQSRIAAEEAVNRIPTVVGPPGPKGEQGPAGPQGPKGDKGERGDTGPVGATGERGPAGDAGPAGPQGPKGDRGERGETGLTGNAGPQGPKGDTGAAGPAGPQGPKGETGAAGPVGATGPQGPKGDPGETQIRFRLGPGNIIETNSNGWFPDTDGALITGLTFLAPKDATRVQGFFQHLQVRFGDGPWQDVKGLDEVGSDTGRTGE

SEQ ID NO: 120 - protein, 434 aa, Escherichia coli
MTVKISGVLKDGTGKPVQNCTIVLKARRTSSTVVVNTVASENPDEAGRYSMDVEYGQYSVILLVEGFPPSHAGTITVYEDSQPGTLNDFLGAMSEDDVRPEALRRFELMVEEAARHAEEAKKNAGEAETSARNAGISASQAEESAANADTSAGDASESARQAAESAAAAKQSEEASSSSASAAAQKASESLQSATDAELSKKTAESAAGNAARDATTAAEKARESAESAQSAEQSRIAAEEAVNRIPTVVGPPGPKGEPGPAGPQGPKGDKGERGDTGPVGATGERGPRGDTGPAGPQGPKGDRGERGETGLTGNAGPQGPKGDTGAAGPQGPKGETGAAGPVGATGPQGPKGDPGETQIRFRLGPGNIIETNSNGWFPDTDGALITGLTFLAPKDATRVQGFFQHLQVRFGDGPWQDVKGLDEVGSDTGRTGE

SEQ ID NO: 121 - protein, 437 aa, Escherichia coli; identical to SEQ ID NO: 115

SEQ ID NO: 122 - protein, 437 aa, Escherichia coli; identical to SEQ ID NO: 52

SEQ ID NO: 123 - protein, 439 aa, Escherichia coli
MNMAVKISGVLKDGTGKPVENCTIQLKARRTSSTVVVNTVASENPDEAGRYSMDVEYGQYSVILLVEGFPPSHAGTITVYEDSQPGTLNDFLGAMTEDDARPEALRRFELMVEEVARHAEEAKKNAGEAETSARNAGISASQAEESAANADTSAGEASESARQAAESAASAKQSEDASSSSASAAAQKASESSQSAAEAELSRKTAESAAGNAARDATTATEKARESAESAQSAEQSRIAAEEAVNRIPTVVGPPGPKGEQGPAGPQGPKGDKGERGDTGPVGATGERGPAGDAGPAGPQGPKGDRGERGETGLTGNAGPQGPKGDTGAAGPAGPQGPKGETGAAGPVGATGPQGPKGDPGETQIRFRLGPASIIETNSNGWFPGTDGALITGLTFLDPKDATQVQGLFQHLQVRFGDGPWQDVKGLDEVGSDTGRTGE

SEQ ID NO: 124 - protein, 437 aa, Escherichia coli
MAVKISGVLKDGTGKPVENCTIQLKARRTSSTVVVNTVASENPDEAGRYSMDVEYGQYSVILLVEGFPPSHAGTITVYEDSQPGTLNDFLGAMTEDDARPEALRRFELMVEEVARHAEEAKKNAGEAETSARNAGISASQAEESAANADTSAGEASESARQAAESAASAKQSEDASSSSASAAAQKASESSQSAAEAELSRKTAESAAGNAARDATTATEKARESAESAQSAEQSRIAAEEAVNRIPTVVGPPGPKGEQGPAGPQGPKGDKGERGDTGPVGATGERGPAGDAGPAGPQGPKGDRGERGETGLTGNAGPQGPKGDTGAAGPAGPQGPKGETGAAGPVGATGPQGPKGDPGETQIRFRLGPASIIETNSNGWFPGTDGALITGLTFLDPKDATQVQGFFQHLQVRFGDGPWQDVKGLDEVGSDTGRTGE

SEQ ID NO: 125 - protein, 411 aa, Escherichia coli
MNMAVKISGVLKDGTGKPVENCTIQLKARRTSSTVVVNTVVVNTVASENPDEAGRYSMDVEYGQYSVILLVEGFPPSHAGIITVYEDSQPGTLNDFLGAMSEDDVRPEALRRFELMVEEAARHAEEAKKNAGEAETSARNAGISASKAEASAANADTSAGEASESARQATESAASAKQSEEASSSSASAAAQKASESSQSAADAELSRKTAESAAGNAARDATTATEKARESAESAQSAEQSRIAAEEAVNRIPTVVGPPGPKGEPGPAGPQGPKGDKGERGDTGPAGATGERGPAGDAGPAGPAGPQGPKGETGAAGPVGATGPQGPKGDPGETQIRFRLGPGNIIETNSHGWFPDTDGALITGLTFLDPKDATRVQGFFQHLQVRFGDGPWQDVKGLDEVGSDTGRTGE

SEQ ID NO: 126 - protein, 437 aa, Escherichia coli
MAVKISGVLKDGTGKPVENCTIQLKARRTSSTVVVNTVASENPDEAGRYSMDVEYGQYSVILLVEGFPPSHAGTITVYEDSQPGTLNDFLGAMTEDDARPEALRRFELMVEEVARHAEEAKKNAGEAETSARNAGISASQAEESAANADTSAGEASESARQAAESAASAKQSEDASSSSASAAAQKASESSQSAAEAELSRKTAESAAGNAARDATTATEKARESAESAQSAEQSRIAAEEAVNRIPTVVGPPGPKGEQGPAGPQGPKGDKGERGDTGPVGATGERGPAGDAGPAGPQGPKGDRGERGETGLTGNAGPQGPKGDTGAAGPAGPQGPKGETGAAGPVGATGPQGPKGDPGETQIRFRLGPASIIETNSNGWFPGTDGALITGLTFLDPKDATQVQGLFQHLQVRFGDGPWQDVKGLDEVGSDTGRTGE

SEQ ID NO: 127 - protein, 440 aa, Escherichia coli
MGMAAVQISGVLKDGAGKPIQNCTIQLKARRNSTTVVVNTVASENPDEAGRYSMDVEYGQYSVTLLVEGFPPSHAGTISVYEDSQPGTLNDFLGAMTEDDARPEALRRFEQMVEEAARHAEEAKKNAGEAETSARNAGISASKAEASAANADTSAEDASESARQAAESAASAKKSEEASSSSASEAAQKASESLQSATDAELSKKTAESAAGNAARDATTATEKARESAESAQSAEQSRIAAEDAVNRIPTVVGPPGPKGEPGPAGPQGPKGDKGERGDTGPAGATGERGPGGDTGPAGPQGPKGDRGERGETGLTGSTGPQGPKGDTGATGPAGPQGPKGETGAAGPVGATGPQGAKGDPGETQIRFRLGPASIIETNSYGWFPGTDGALITGLTFLDPKDATQVQGMFQHLQVRFGDGPWQDVKGLDEVGSDTGRTGE

SEQ ID NO: 128 - protein, 440 aa, Escherichia coli
MAVKISGVLKDGTGKPVENCTIQLKARRTSSTVVVNTVASENPDEAGRYSMDVEYGQYSVILLVEGFPPSHAGTITVYEDSQPGTLNDFLGAMSEDDVRPEALRRFELMVEEAARHAEEAKKNAGEAETSARNAGISSSKAEASAANADTSAGDALESARQAAESAAAAKQSEDASSSSASAAAQKASESSQSAAEAELSRKTAESAAGNAARDATTATEKARESAESAQSAEQSRIAAEEAVNRIPTVVGPPGPKGEQGPAGPQGPKGDKGERGDTGPVGATGERGPAGNAGPAGPQGPKGDRGERGERGETGLTGNAGPQGPKGDTGAAGPAGPQGPKGETGAAGPVGATGPQGPKGDPGETQIRFRLGPGNIIETNSHGWFPDTDGALITGLTFLDPKDATRVQVFFQHLQVRFGDGPWQDVKGLDEVGSDTGRTGE

SEQ ID NO: 129 - protein, 439 aa, Escherichia coli
MNMAVKISGVLKDGTGKPVQNCTIQLKAKRNSTTVVVNTLASENPDEAGRYSMDVEYGQYSVILLVEGFPPSHAGTITVYEDSQPGTLNDFLGAMTEDDARPEALRRFELMVEEVARHAEEAKKNAGEAETSARNAGISASQAEESAANVDTSAGEASESARQAAESAASAKQSEDASSSSASAAAQKASESSQSAAEAELSRKTAESAAGNAARDATTATEKARESAESAQSAEQSRIAAEEAVNRIPTVVGPPGPKGEPGPAGPQGPKGDKGERGDTGPVGATGERGPGGDTGPAGPQGPKGDRGERGETGLTGNAGPQGPKGDTGAAGPAGPQGPKGETGAAGPVGATGPQGPKGDPGETQIRFRLGPGNIIETNSHGWFPDTDGALITGLTFLDPKDATRVQGFFQHLQVRFGDGPWQDVKGLDEVGSDTGRTGE

SEQ ID NO: 130 - protein, 437 aa, Escherichia coli
MAVKISGVLKDGTGKPVENCTIQLKARRNSATVVVNTVASENPDEAGRYSMDVEYGQYSVILLVEGFPPSHAGTITVYEDSQPGTLNDFLGAMSEDDVRPEALRRFELMVEEAARHAEEAKKNAGEAETSARNAGISASQAEESAANADTSAGDALESARQAAESAAAAKQSEDASSSSASAAAQKASESSQSAAEAELSRKTAESAAGNAARDATTATEKARESAESAQSAEQSRIAAEEAVNRIPTVVGPPGPKGEQGPAGPQGPKGDKGERGDTGPVGATGERGPAGDAGPAGPQGPKGDRGERGETGLTGNAGPQGPKGDTGAAGPAGPQGPKGETGAAGPVGATGPQGPKGDPGETQIRFRLGPASIIETNSNGWFPDTDGALITGLTFLDPKDATQVQGLFRHLQVRFGDGPWQDVKGLDEVGSDTGRTGE

SEQ ID NO: 131 - protein, 437 aa, Escherichia coli; identical to SEQ ID NO: 49

SEQ ID NO: 132 - protein, 361 aa, Escherichia coli
MYEDSQPGTLNDFLGAMSEDDVRPEALRRFELMVEEAARHAEEAKKNAGEAETSARNAGISASQAEESAANADTSAGDASESARQAAESAAAAKQSEDASSSSASAAAQKASESSQSAAEAELSRKTAESAAGNAARDATTATEKARESAESAQSAEQSRIAAEEAVNRIPTVVGPPGPKGEQGPAGPQGPKGDKGERGDTGPVGATGERGPAGDAGPAGPQGPKGDRGERGETGLTGNAGPQGPKGDTGAAGPAGPQGPKGETGAAGPVGATGPQGPKGDPGETQIRFRLGPGNIIETNSNGWFPDTDGALITGLTFLAPKDATRVQGFFQHLQVRFGDGPWQDVKGLDEVGSDTGRTGE

SEQ ID NO: 133 - protein, 439 aa, Escherichia coli
MNMAVKISGVLKDGTGKPVENCTIQLKARRNSATVVVNTVASENPDEAGRYSMDVEYGQYSVILLVEGFPPSHAGTITVYEDSQPGTLNDFLGAMSEDDVRPEALRRFELMVEEAARHAEEAKKNAGEAETSARNAGISASQAEESAANADTSAGDASESARQAAESAAAAKQSEEASSSSASAAAQKASESSQSAAEAELSRKTAESAAGNAARDATTATEKARESAESAQSAEQSRIAAEEAVNRIPTVVGPPGPKGEPGPAGPQGPKGDKGERGDTGPAGATGERGPAGDAGPAGPQGPKGDRGERGETGLTGNAGPQGPKGDTGAAGPAGPQGPKGETGAAGPVGATGPQGPKGDPGETQIRFRLGPASIIETNSHGWFPGTDGALITGLTFLAPKDATRVQVFFQHLQVRFGDGPWQDVKGLDEVGSDTGRTGE

SEQ ID NO: 134 - protein, 438 aa, Escherichia coli; identical to SEQ ID NO: 48

SEQ ID NO: 135 - protein, 440 aa, Escherichia coli
  misc_feature (35)..(35): Xaa can be any naturally occurring amino acid
MGMAAVQISGVLKDGAGKPIQNCTIQLKARRNSTXVVVNTVASENPDEAGRYSMDVEYGQYSVTLLVEGFPPSHAGTISVYEDSQPGTLNDFLGAMTEDDARPEALRRFEQMVEEAARHAEEAKKNAGEAETSARNAGISASKAEASAANADTSAEDASESARQAAESAASAKKSEEASSSSASEAAQKASESLQSATDAELSKKTAESAAGNAARDATTSTEKARESAESAQSAEQSRIAAEDAVNRIPTVVGPPGPKGEPGPAGPQGPKGDKGERGDTGPAGATGERGPGGDTGPAGPQGPKGDRGERGETGLTGNAGPQGPKGDTGAAGPAGPQGPKGETGAAGPVGATGPQGPKGDPGETQIRFRLGPMRIIETNSYGWFPGTDGALITGLTFLDPKDATQVQGMFQHLQVRFGDGPWQDVKGLDEVGSDTGRTGE

SEQ ID NO: 136 - protein, 439 aa, Escherichia coli
MNMAVKISGVLKDGTGKPVENCTIQLKARRNSATVVVNTVASENPDEAGRYSMDVEYGQYSVILLVEGFPPSHAGTITVYEDSQPGTLNDFLGAMSEDDVRPEALRRFELMVEEAARHAEEAKKNAGEAETSARNAGISASQAEESAANADTSAGDASESARQAAESAAAAKQSEEASSSSASAAAQKASESSQSAADAELSKKTAESAAGNAARDATTATEKARESAESAQSAEQSRIAAEEAVNRIPTVVGPPGPKGEPGPAGPQGPKGDKGERGDTGPVGATGERGPAGDAGPAGPQGPKGDRGERGETGLTGNAGPQGPKGDTGAAGPAGPQGPKGETGAAGPVGATGPQGPKGDPGETQIRFRLGPASIIETNSHGWFPGTDGALITGLTFLAPKDTTRVQGFFQHLQVRFGDGPWQDVKGLDEVGSDTGRTGE

SEQ ID NO: 137 - protein, 439 aa, Escherichia coli
  misc_feature (31)..(31): Xaa can be any naturally occurring amino acid
  misc_feature (33)..(33): Xaa can be any naturally occurring amino acid
  misc_feature (176)..(176): Xaa can be any naturally occurring amino acid
MNMAVKISGVLKDGTGKPVENCTIQLKARRXSXTVVVNTVASENPDEAGRYSMDVEYGQYSVILLVEGFPPSHAGTITVYEDSQPGTLNDFLGAMSEDDVRPEALRRFELMVEEAARHAEEAKKNAGEAETSARNAGISASQAEESAANADTSAGDASESARQAAESAAAAKQSEXASSSSASAAAQKASESSQSAAEAELSRKTAESAAGNAARDATTATEKARESAESAQSAEQSRIAAEEAVNRIPTVVGPPGPKGEQGPAGPQGPKGDKGERGDTGPVGATGERGPAGDAGPAGPQGPKGDRGERGETGLTGNAGPQGPKGDTGAAGPAGPQGPKGETGAAGPVGATGPQGPKGDPGETQIRFRLGPGNIIETNSNGWFPDTDGALITGLTFLAPKDATRVQGFFQHLQVRFGDGPWQDVKGLDEVGSDTGRTGE

SEQ ID NO: 138 - protein, 437 aa, Escherichia coli; identical to SEQ ID NO: 50

SEQ ID NO: 139 - protein, 407 aa, Escherichia coli; identical to SEQ ID NO: 5

SEQ ID NO: 140 - protein, 439 aa, Escherichia coli
  misc_feature (31)..(31): Xaa can be any naturally occurring amino acid
  misc_feature (158)..(158): Xaa can be any naturally occurring amino acid
  misc_feature (176)..(176): Xaa can be any naturally occurring amino acid
  misc_feature (261)..(261): Xaa can be any naturally occurring amino acid
  misc_feature (282)..(282): Xaa can be any naturally occurring amino acid
  misc_feature (380)..(380): Xaa can be any naturally occurring amino acid
  misc_feature (385)..(385): Xaa can be any naturally occurring amino acid
  misc_feature (398)..(398): Xaa can be any naturally occurring amino acid
  misc_feature (402)..(402): Xaa can be any naturally occurring amino acid
MNMAVKISGVLKDGTGKPVENCTIQLKARRXSATVVVNTVASENPDEAGRYSMDVEYGQYSVILLVEGFPPSHAGTITVYEDSQPGTLNDFLGAMSEDDVRPEALRRFELMVEEAARHAEEAKKNAGEAETSARNAGISASQAEESAANADTSAGDAXESARQAAESAAAAKQSEXASSSSASAAAQKASESSQSAAEAELSRKTAESAAGNAARDATTATEKARESAESAQSAEQSRIAAEEAVNRIPTVVGPPGPKGEXGPAGPQGPKGDKGERGDTGPXGATGERGPAGDAGPAGPQGPKGDRGERGETGLTGNAGPQGPKGDTGAAGPAGPQGPKGETGAAGPVGATGPQGPKGDPGETQIRFRLGPASIIETNSXGWFPXTDGALITGLTFLXPKDXTRVQGFFQHLQVRFGDGPWQDVKGLDEVGSDTGRTGE

SEQ ID NO: 141 - protein, 437 aa, Escherichia coli; identical to SEQ ID NO: 130

SEQ ID NO: 142 - protein, 465 aa, Escherichia coli
MGSSHHHHHHSSGLVPRGSHMAVKISGVLKDGTGKPVENCTIQLKARRNSATVVVNTVASENPDEAGRYSMDVEYGQYSVILLVEGFPPSHAGTITVYEDSQPGTLNDFLGAMSEDDVRPEALRRFELMVEEAARHAEEAKKNAGEAETSARNAGISASQAEESAANADTSAGDASESARQAAESAAAAKQSEEASSSSASAAAQKASESSQSAADAELSKKTAESAAGNAARDATTATEKARESAESAQSAEQSRIAAEEAVNRIPTVVGPPGPKGEQGPAGPQGPKGDKGERGDTGPVGATGERGPAGDAGPAGPQGPKGDRGERGETGLTGNAGPQGPKGDTGAAGPAGPQGPKGETGAAGPVGATGPQGPKGDPGETQIRFRLGPASIIETNSNGWFPDTDGALITGLTFLAPKDATRVQGFFQHLQVRFGDGPWQDVKGLDEVGSDTGRTGELEHHHHHH

SEQ ID NO: 143 - protein, 645 aa, Escherichia coli
MSVVVSGTLKSPDGEAISGANITLTALTVSPDALSGTSASAVTREGGYYGMTMDPGEYAVSVTVKGKTVVYGRVRIEGTESTVTLNMLLRRSLVEVSIPGELLTDFRQIQNNVADDLATIRRLNEDTATKNTQATQSKESAAASAKSASDSAKTATSRAAEAGQKATDATEAATRAVTAAGNAEESSTRAGESEKAAGADAEKARQHAEKARLAQESAGEILKRAEAATVSAEEARRMAENARGPRGPQGETGPKGDVGPKGETGPVGPQGPAGPKGERGDVGAQGAVGPAGPRGEKGEQGERGPQGIPGLKGDTGERGPKGDQGDMGPKGEKGDPGGPAGPQGPKGERGEAGPQGPMGARGERGETGPRGEPGPAGPRGERGETGPQGPRGEPGPAGSAANVADATTAQKGIVQLSSATDSDDETKAATPKAVKAAMDVANEAKTKAEEAAAGGGVPGPKGDKGDTGPAGPAGPKGDKGERGDTGPVGATGERGPAGDAGPAGPQGPKGDRGERGETGLTGNAGPQGPKGDTGAAGPAGPQGPKGETGAAGPVGATGPQGPKGDPGETQIRFRLGPGNIIETNSHGWFPDTDGALITGLTFLDPKDATRVQGFFQHLQVRFGDGPWQDVKGLDEVGSDTGRTGE

SEQ ID NO: 144 - protein, 645 aa, Escherichia coli; identical to SEQ ID NO: 143

SEQ ID NO: 145 - protein, 645 aa, Escherichia coli; identical to SEQ ID NO: 143

SEQ ID NO: 146 - protein, 645 aa, Escherichia coli; identical to SEQ ID NO: 143

SEQ ID NO: 147 - protein, 645 aa, Escherichia coli; identical to SEQ ID NO: 143

SEQ ID NO: 148 - protein, 645 aa, Escherichia coli
MSVVVSGTLKSPDGEAISGANITLTALTVSPDALSGTSASAVTREGGYYGMTMDPGEYAVSVTVKGKTAVYGRVRIEGTESTVTLNMLLRRSLVEVSIPGELLTDFRQIQNNVADDLATIRRLNEDTATKNTQATQSKESAAASAKSASDSAKTATSRAAEAGQKATDATEAATRAVTAAGNAEESSTRAGESEKAAGADAEKARQHAEKARLAQESAGEILKRAEAATVSAEEARRMAENARGPRGPQGETGPKGDVGPKGETGPVGPQGPAGPKGERGDVGAQGAVGPAGPRGEKGEQGERGPQGIPGLKGDTGERGPKGDQGDMGPKGEKGDPGGPAGPQGPKGERGEAGPQGPMGARGERGETGPRGEPGPAGPRGERGETGPQGPRGEPGPAGSAANVADATTAQKGIVQLSSATDSDDETKAATPKAVKAAMDVANEAKTKAEEAAAGGGVPGPKGDKGDTGPAGPAGPKGDKGERGDTGPVGATGERGPAGDAGPAGPQGPKGDRGERGETGLTGNAGPQGPKGDTGAAGPAGPQGPKGETGAAGPVGATGPQGPKGDPGETQIRFRLGPGNIIETNSHGWFPDTDGALITGLTFLDPKDATRVQGFFQHLQVRFGDGPWQDVKGLDEVGSDTGRTGE

SEQ ID NO: 149 - protein, 645 aa, Escherichia coli; identical to SEQ ID NO: 148

SEQ ID NO: 150 - protein, 645 aa, Escherichia coli; identical to SEQ ID NO: 143

SEQ ID NO: 151 - protein, 645 aa, Escherichia coli; identical to SEQ ID NO: 148

SEQ ID NO: 152 - protein, 645 aa, Escherichia coli; identical to SEQ ID NO: 143

SEQ ID NO: 153 - protein, 645 aa, Escherichia coli
MSVVVSGTLKSPDGEAISGANITLTALTVSPDALSGTSASAVTREGGYYGMTMDPGEYAVSVTVKGKTAVYGRVRIEGTESTVTLNMLLRRSLVEVSIPGELLTDFRQIQNNVADDLATIRRLNEDTATKNAQATQSKESAAASAKSASDSAKTATSRAAEAGQKATDATEAATRAVTAAGNAEESSTRAGESEKAAGADAEKARQHAEKARLAQESAGEILKRAEAATVSAEEARRMAENARGPRGPQGETGPKGDVGPKGETGPVGPQGPAGPKGERGDVGAQGAVGPAGPRGEKGEQGERGPQGIPGLKGDTGERGPKGDQGDMGPKGEKGDPGGPAGPQGPKGERGEAGPQGPMGARGERGETGPRGEPGPAGPRGERGETGPQGPRGEPGPAGSAANVADATTAQKGIVQLSSATDSDDETKAATPKAVKAAMDVANEAKTKAEEAAAGGGVPGPKGDKGDTGPAGPAGPKGDKGERGDTGPVGATGERGPAGDAGPAGPQGPKGDRGERGETGLTGNAGPQGPKGDTGAAGPAGPQGPKGETGAAGPVGATGPQGPKGDPGETQIRFRMGPGNIIETNSNGWFPDTDGALITGLTFLDPKDATRVQGFFQHLQVRFGDGPWQDVKGLDEVGSDTGRTGE

SEQ ID NO: 154 - protein, 645 aa, Escherichia coli; identical to SEQ ID NO: 148

SEQ ID NO: 155 - protein, 645 aa, Escherichia coli; identical to SEQ ID NO: 148

SEQ ID NO: 156 - protein, 645 aa, Escherichia coli; identical to SEQ ID NO: 148

SEQ ID NO: 157 - protein, 645 aa, Escherichia coli; identical to SEQ ID NO: 148

SEQ ID NO: 158 - protein, 678 aa, Escherichia coli
MSVVVSGTLKSPDGEAISGANITLTALTVSPDALSGTSASAVTREGGYYGMTMDPGEYAVSVTVKGKTAVYGRVRIEGTESTVTLNMLLRRSLVEVSIPGELLTDFRQIQNNVADDLATIRRLNEDTATKNTQATQSKESAAASAKSASDSAKTATSRAAEAGQKATDATEAATRAVTAAGNAEESSTRAGESEKAAGADAEKARQHAEKARLAQESAGEILKRAEAATVSAEEARRMAENARGPRGPQGETGPKGDVGPKGETGPVGPQGPAGPKGERGDVGAQGAVGPAGPRGEKGEQGERGPQGIPGLKGDTGERGPKGDQGDMGPKGEKGDPGGPAGPQGPKGERGEAGPQGPMGARGERGDTGPRGEPGPAGPRGERGETGPQGPMGARGERGETGPRGEPGPAGPRGERGETGPQGPRGEPGPAGSAANVADATTAQKGIVQLSSATDSDDETKAATPKAVKAAMDVANEAKTKAEEAAAGGGVPGPKGDKGDTGPAGPAGPKGDKGERGDTGPVGATGERGPAGDAGPAGPQGPKGDRGERGETGLTGNAGPQGPKGDTGAAGPAGPQGPKGETGAAGPVGATGPQGPKGDPGETQIRFRLGPGNIIETNSHGWFPDTDGALITGLTFLDPKDATRVQGFFQHLQVRFGDGPWQDVKGLDEVGSDTGRTGE

SEQ ID NO: 159 - protein, 645 aa, Escherichia coli; identical to SEQ ID NO: 148

SEQ ID NO: 160 - protein, 645 aa, Escherichia coli
MSVVVSGTLKSPDGEAISGANITLTALTVSPDALSGTSASAVTREGGYYGMTMDPGEYAVSVTVKGKTAVYGRVRIEGTESTVTLNMLLRRSLVEVSIPGELLTDFRQIQNNVADDLATIRRLNEDTATKNTQATQSKESAAASAKSASDSAKTATSRAAEAGQKATDATEAATRAVTAAGNAEESSTRAGESEKAAGADAEKARQHAEKARLAQESAGEILKRAEAATVSAEEARRMAENARGPRGPQGETGPKGDVGPKGETGPVGPQGPAGPKGERGDVGAQGAVGPAGPRGEKGEQGERGPQGIPGLKGDTGERGPKGDQGDMGPKGEKGDPGGPAGPQGPKGERGEAGPQGPMGARGERGETGPRGEPGPAGPRGERGETGPQGPRGEPGPAGSAANVADATTAQKGIVQLSSATDSDDETKAATPKAVKAAMDVANEAKTKAEEAAAGGGVPGPKGDKGDTGPAGPAGPKGDKGERGDTGPVGATGERGPAGDAGPAGPQGPKGDRGERGETGLTGNAGPQGPKGNTGAAGPAGPQGPKGETGAAGPVGATGPQGPKGDPGETQIRFRLGPGNIIETNSHGWFPDTDGALITGLTFLDPKDATRVQGFFQHLQVRFGDGPWQDVKGLDEVGSDTGRTGE

SEQ ID NO: 161 - protein, 645 aa, Escherichia coli; identical to SEQ ID NO: 148

SEQ ID NO: 162 - protein, 595 aa, Escherichia coli
MTMDPGEYAVSVTVKGKTAVYGRVRIEGTESTVTLNMLLRRSLVEVSIPGELLTDFRQIQNNVADDLATIRRLNEDTATKNTQATQSKESAAASAKSASDSAKTATSRAAEAGQKATDATEAATRAVTAAGNAEESSTRAGESEKAAGADAEKARQHAEKARLAQESAGEILKRAEAATVSAEEARRMAENARGPRGPQGETGPKGDVGPKGETGPVGPQGPAGPKGERGDVGAQGAVGPAGPRGEKGEQGERGPQGIPGLKGDTGERGPKGDQGDMGPKGEKGDPGGPAGPQGPKGERGEAGPQGPMGARGERGETGPRGEPGPAGPRGERGETGPQGPRGEPGPAGSAANVADATTAQKGIVQLSSATDSDDETKAATPKAVKAAMDVANEAKTKAEEAAAGGGVPGPKGDKGDTGPAGPAGPKGDKGERGDTGPVGATGERGPAGDAGPAGPQGPKGDRGERGETGLTGNAGPQGPKGDTGAAGPAGPQGPKGETGAAGPVGATGPQGPKGDPGETQIRFRLGPGNIIETNSHGWFPDTDGALITGLTFLDPKDATRVQGFFQHLQVRFGDGPWQDVKGLDEVGSDTGRTGE

SEQ ID NO: 163 - protein, 566 aa, Escherichia coli
MSVVVSGTLKSPDGEAISGANITLTALTVSPDALSGTSASAVTRDGGYYGMTLEPGEYAVSVTVKGKTAVYGRVRIEGTESTVTLNMLLRRSLVEVSIPGELLTDFRQIQNNVADDLATIRRLNEDTAVKNNQASQSKESAAASAKTASESAKAATSKATESAQKASEAAEAATRAGESEKAAAADAKEARQHAETARVAQEAAGDVLKRAEAATVSAEEARRMAENARGPKGDTGPKGDAGPRGETGPAGPRGEKGEQGERGPQGPRGEPGPAGSAANVADATTAQKGIVQLSSATDSDDETKAATPKAVKAAMDEARAAKQKAEEVATTRPSGESIPGPKGDRGEQGPAGPTGPKGERGEPGPQGPAGQKGEQGLRGLQGATGPAGAVGPAGPQGPAGAAGPKGDAGPAGPRGERGPAGAQGVPGPVGPAGPAGKTGPRGLQGETGRQGPTGPQGPTGETGPQGPQGPTGRLVPGEIYSIGTYIIAALGPYITDIGRTYQPGETVSGSRLKRCALIKDENGNYMKANTDGIDGNLSSVPGSWMVCNEITSTNDNEGIGLFQRAY

SEQ ID NO: 164 - protein, 517 aa, Escherichia coli
MTVRISGVLKDGTGKPVPGCTIELKARRTTETVIVTTVAQGQPGETGSYSFDVEPGWYRVTLNTEGYAPSYVGDILVKADSEPGTLNKFLMEQDEAQYYPKALAELEAVAAEILKRAEASAASAEEAKKRAENARGPAGEKGDTGPQGATGAQGPAGATGAVGPKGEPGPKGERGETGPQGPKGDKGDPGGPPGPKGDTGPRGEAGPPGPQGPAGQTGPKGDKGEPGATGPAGPAGPRGETGPAGPAGPAGSVASVPDASTSQKGVVQLSSDTNSDDETKAATPKAVKAVMAEVQAAKTKAEEAATRAAVPGPKGDRGEPGAPGAVGPAGPRGPAGAAGPKGDAGPAGPAGKDGTAGAEGKAGPAGPRGERGPAGAQGVPGPVGPAGPAGKTGPRGLQGETGRQGPTGPQGPTGEPGPQGPTGRLVPGEIYSIGTYIIAALGPYITDIGRTYQPGETVSGSRLKRCALIKDENGNYMKANTDGIDGNLSSVPGSWMVCNEITSTNDNEGIGLFQRAY

SEQ ID NO: 165 - protein, 493 aa, Escherichia coli
MTVRISGVLKDGTGKPVPGCTIELKARRTTETVIVTTVAQGQPGETGSYSFDVEPGWYRVTLNTEGYAPSYVGDILVKADSEPGTLNKFLMEQDEAQYYPKALAELEAVAAEILKRAEASAASAEEAKKRAENARGPAGEKGDTGPQGATGPQGPAGATGAVGPKGEPGPKGERGETGPQGPKGDKGDPGGPPGPKGDTGPRGEAGPPGPPGPQGPAGQTGPKGDKGEPGATGPAGPAGSVASVPDASTSQKGVVQLSSDTNSDDETKAATPKAVKAVMAEVQAAKTKAEEAATRAAVPGPKGDRGEPGAPGAVGPAGPRGPAGAAGPKGDAGPAGKDGTAGAEGKAGPAGPRGERGPAGAQGVPGPRGPAGGRGPMGPPGLDGKTGPQGPQGPQGPTGRLVPGEIYSIGTYIIAALGPYITDIGRTYQPGETVSGSRLKRCALIKDENGNYMKANTDGIDGNLSSVPGSWMVCNEITSTNDNEGIGLFQRAY

SEQ ID NO: 166 - protein, 520 aa, Escherichia coli
MTVRISGVLKDGTGKPVPGCTIELKARRTTETVIVTTVAQGQPGETGSYSFDVEPGWYRVTLNTEGYAPSYVGDILVKADSEPGTLNKFLMEQDEAQYYPKALAELEAVAAEILKRAEASAASAEEAKKRAENARGPAGEKGDTGPQGATGAQGPAGATGAVGPKGEPGPKGERGETGPQGPKGDKGDPGGPPGPKGDTGPRGEAGPPGPQGPAGQTGPKGDKGEPGATGPAGPAGPRGETGPAGPAGPAGSVASVPDASTSQKGVVQLSSDTNSDDETKAATPKAVKAVMAEVQAAKTKAEEAATRAAVPGPKGDRGEPGAPGAVGPAGPRGPAGAAGPKGDAGPAGPAGKDGTAGAEGKAGPAGPRGERGPAGAQGVPGPVGPAGPAGKTGPRGLQGETGRQGPTGPQGPTGETGPQGPQGPTGRLVPGEIYSIGTYIIAALGPYITDIGRTYQPGETVSGSRLKRCALIKDENGNYMKANTDGIDGILSSVPGSWMVCNEITSTNDNESIGLFQRAY

SEQ ID NO: 167 - protein, 502 aa, Escherichia coli
MTVRISGVLKDGTGKPVPGCTIELKARRTTETVIVTTVAQGQPGETGSYSFDVEPGWYRVTLNTEGYAPSYVGDILVKADSEPGTLNKFLMEQDEAQYYPKALAELEAVAAEILKRAEASAASAEEAKKRAENARGPAGEKGDTGPQGATGAQGPAGATGAVGPKGEPGPKGERGETGPQGPKGDKGDPGGPPGPKGDTGPRGEAGPPGPQGPAGQTGPKGDKGEPGATGPAGPAGPRGETGPAGPAGPAGSVASVPDASTSQKGVVQLSSDTNSDDETKAATPKAVKAVMAEVQAAKTKAEEAATRAAVPGPKGDRGEPGAPGAVGPAGPRGPAGAAGPKGDAGPAGPRGERGPAGAQGVPGPVGPAGPAGKTGPRGLQGETGRQGPTGPQGPTGEPGPQGPQGPTGRLVPGEIYSIGTYIIAALAPYTTDIGRTYQPGETVQGSRLKRCAIIKDASGNYMKANTDGIDGNLSSVPGSWMVCNEITSTNDNEGIGLFQRAY

SEQ ID NO: 168 - protein, 479 aa, Escherichia coli
MTVRISGVLKDGTGKPVPGCTIELKARRTTETVIVTTVAQGQPEETGSYSFDVEPGWYRVTLNTEGYAPSYVGDILVKADSEPGTLNKFLMEQDEAQYYPKALAELEAVAAEILKRAEASAASAEEAKKRAENARGPAGEKGDTGPQGATGAKGPAGATGAVGPKGEPGPKGERGETGPQGPKGDKGDPGGPPGPKGDTGPRGEAGPRPQGPAGQTGPKGDKGEPGATGPAGPAGPRGETGPAGPAGPAGSVASVPDASTSQKGVVQLSSDTNSDDETKAATPKAVKAVMAEVQAAKTKAEEAATRAAVPGPKGDRGEPGAPGAVGPAGPQGPAGAAGAKGAPGPKGDKGEPGATGPAGPQGKTGPAGPRGPAGPQGAAGRNGNVSTEKYAVGSFLFGSISTLESESAIKENINGEKITEVAILYRVGVTYSPTFSIVHNAGNSIPGTWRAFVSALSLGAPGYDEQTMTTNLTLFQRIV

SEQ ID NO: 169 - protein, 673 aa, Escherichia coli
MSVVVSGTLKSPDGQVVSDANITLTALTVSPDALSGTSASAVTTSTGYYGMTMEPGEYAVSVTVRGKSQVYGRVRIDGTESSVTLNMLLRRSLVEVSISDELLTDFRQIQNNVADDLTTIRELKEESVKNNTGLTQARESAEASARSASESAATATARAEETEQKAEEAKASATNAAASAEEARQHAENAQSAQATAEDVLERAEAAVVSAEEARSMAENARGPKGDTGPKGDTGPRGETGPAGPQGPTGARGETGPQGSVGPAGPRGEKGEQGERGPQGLQGLKGETGERGPQGVQGPAGPTGATGPAGPRGERGEQGIQGPAGATGPVGPQGERGIQGPAGPAGPRGETGARGEKGDPGDPGGPPGPKGDTGPAGPAGEKGEPGERGPQGLQGPPGPAGERGPTGEAGPAGQPGPKGDPGPAGPQGPAGERGAQGPQGVAGPVGPAGAAGAKGDKGDPGPAGPQGQPGPQGPAGETGPAGEPGPRGEPGPQGLKGDRGEPGPTGPQGPAGERGPQGPQGVAGPVGPAGEPGAKGDKGDPGGTELLASANTWTQPQTINGDLTVTGNGSFNDVQIRSDKRNKRNAIRIDNCLEKLDLLTGYLYEIQNADGSWQQSVGLFAQDALKAQPELVTSDTDIISGEERFRLNYNGVIALLVEGIKNLRKEISDLKEK

SEQ ID NO: 170 - DNA, 1215 bp, Escherichia coli
atggcagtaaagatttcaggtgtactgaaagacggcacaggaaaaccggtagagaactgcaccattcaactgaaagccagacggaccagcagcacggtggtggtgaacacggtggcctctgaaaatccggatgaagccggtcgttacagcatggacgttgagtacggtcagtacagcgtcattctgttggtggaaggattcccgccgtcacatgccgggaccatcaccgtgtatgaagattctcaacccggtacgctgaatgattttctcggtgccatgtcggaggatgacgtccggccggaggcactgcgccgttttgaactgatggtggaagaggtggcgcgtcacgctgaggaggcgaagaagaatgccggagaggcggagacgtcagcgaggaatgccggcatatcagccagtcaggcagaagagagcgctgcaaatgctgacacttcagcaggggaggcatcggagtcagcccggcaggcggcagaaagtgcagccgctgcaaagcagtcagaggaggcgtcctcgtcctcggcctctgcggccgctcaaaaagccagtgagtcatcacaaagtgcagcagaagctgaattgtcaagaaagacggcagaaagtgcagccggtaatgcagccagggatgcaacgaccgcaacagaaaaagcccgggagtcagcagaaagcgcacagtcagcggaacaaagcaggatagcggcggaagaggccgtaaaccgaatccccaccgtggtgggacctcccgggccaaagggggaacaggggcccgcgggtcctcaggggccgaagggtgataagggagagcggggagagaccggtctgacgggaaatgcaggtccacagggtccaaagggagataccggtgcggcaggcccggcaggcccacagggaccgaaaggagaaacaggtgcggctggcccggtgggggcaaccggacctcagggaccgaagggcgacccgggggagacacaaatacggttccgtctggggccgggaaacattattgagacaaacagcaatggctggttcccggatacagatggcgcactcatcaccggactgacctttcttgaccccaaagatgccacacgggttcagggtttttttcagcatttgcaggtcaggtttggtgacgggccgtggcaggatgtcaaggggctggatgaagtgggcagtgatacaggcagaacaggagaatga

SEQ ID NO: 171 - DNA, 1314 bp, Escherichia coli
atggcagtaaagatttcaggtgtactgaaagacggcacaggaaaaccggtagagaactgcaccattcaactgaaagccagacggaccagcagcacggtggtggtgaacacggtggcctctgaaaatccggatgaagccggtcgttacagcatggacgttgagtacggtcagtacagagtcattctgttggtggaaggattcccgccgtcacatgccgggaccatcaccgtgtatgaagattctcaacccggtacgctgaatgattttctcggtgccatgtcggaggatgacgtccggccggaggcactgcgccgttttgaactgatggtggaagaggtggcgcgtcacgctgaggaggcgaagaagaatgccggagaggcggagacgtcagcgaggaatgccggcatatcagccagtcaggcagaagagagcgcggcaaatgctgacacttcagcaggggaggcatcggagtcagcccggcaggcggcagaaagtgcagccgctgcaaagcagtcagaggaggcgtcctcgtcctcggcttctgcggccgctcaaaaagccagtgagtcatcacaaagtgcagcagaagctgaattgtcaagaaagacggcagaaagtgcagccggtaatgcagccagggatgcaacgaccgcaacagaaaaagcccgggagtcagcagaaagcgcacagtcagcggaacaaagcaggatagcggcggaagaggccgtaaaccgaatccccaccgtggtgggacctcccgggccaaagggggaacaggggcccgcgggtcctcaggggccgaagggtgataagggagagcgcggtgacaccggccctgtcggggcaaccggcgaacggggaccggcaggtgatgctggtccggcaggcccgcaggggccgaaaggtgacatgggagagcggggagagaccggtctgacgggaaatgcaggtccacagggtccaaagggagataccggtgcggcaggcccggcaggcccacagggaccgaaaggagaaacaggtgtggctggcccggtaggggcaaccggacctcagggaccaaagggcgacccgggggagacgcaaatacggttccgtctggggccgggaaacattattgagacaaacagcaatggctggttcccggatacagatggcgcactcatcaccggactgacctttcttgaccccaaagatgccacacgggttcaggggttttttcagcatttgcaggtcaggtttggtgacgggccgtggcaggatgtcaaggggctggatgaagtgggcagtgatacaggcagaacaggagaatga

SEQ ID NO: 172 - DNA, 1314 bp, Escherichia coli
atggcagtaaagatttcaggtgtactgaaagacggcacaggaaaaccggtacagaactgcacaatccagctgaaagcaaaacgtaacagcaccacggtggtggtgaacaccctggcctcagaaaatccggatgaagccgggcgttacagcatggacgttgagtacggtcagtacagcgttattctgttggtggaaggattcccgccgtcacatgccgggaccatcaccgtgtatgaagattctcaaccggggacgctgaatgattttctcggtgccatgtcggaggatgacgtccggccggaggcactgcgtcgttttgaactgatggtggaagaagcggcgcgtcacgctgaggaggcgaagaagaatgccggagaggcggagacgtccgcgaggaatgctggcatatcagccagtcaggcagaagagagcgctgcaaatgctgacacttcagcaggggatgcatcggagtcagcccggcaggcggcagaaagtgcagcctcagcaaagcagtcagaggatgcgtcctcgtcctcggcctctgcggccgctcaaaaagccagtgagtcattacaaagtgcaacagatgctgagttgtcaaaaaagatggcagaaagtgcagccggtaatgcagccagggatgcaacgaccgcaacagaaaaagcccgggagtcagcagaaagcgcacagtcagcggaacaaagcaggatagcggcggaagaggccgtaaaccgaatccccaccgtggtgggacctcccgggccaaagggggaacaggggcccgcgggtcctcaggggccgaagggtgataagggagagcgcggtgacaccggccctgtcggggcaaccggcgaacggggaccggcaggtgatgctggtccggcaggcccgcaggggccgaaaggtgacaggggagagcggggagagaccggtctgacgggaaatgcaggtccacagggtccaaagggagataccggtgcggcaggcccggcaggcccacagggaccgaaaggagaaacaggtgcggctggcccggtgggggcaaccggacctcagggaccgaagggcgacccgggggagacacaaatccgttttcgtctggggccggcgagcattattgagacaaacagcaatggctggttcccggatacagatggcgcactcatcaccggactgacctttcttgaccccaaagatgccacacaggttcaggggctgtttcagcatttgcaggtcaggtttggtgacgggccgtggcaggatgttaaggggctgaatgaagtgggcagtgatacaggcagaacaggagaatga

SEQ ID NO: 173 - DNA, 1314 bp, Escherichia coli
atggcagtaaagatttcaggtgtactgaaagacggcacaggaaaaccggtagagaactgcaccattcaactgaaagccagacgtaacagcgccacggtggtggtgaacacggtggcctctgaaaatccggatgaagccggtcgttacagcatggacgttgagtacggtcagtacagcgttattctgttggtggaagggttcccgccgtcacatgccgggaccatcaccgtgtatgaagattctcaaccggggacgctgaatgattttctcggtgccatgtcggaggatgacgtccggccggaggcactgcgccgttttgaactgatggtggaagaagcggcgcgtcacgctgaggaggcgaagaagaatgccggagaggcggagacgtccgcgaggaatgccggcatatcagccagtcaggcagaagagagcgcggcaaatgctgacacttcagcaggggatgcatcggagtcagcccggcaggcggcagaaagtgcagccgctgcaaagcagtcagaggaggcgtcctcgtcctcggcctctgcggccgctcaaaaagccagtgagtcattacaaagtgcaacagatgctgagttgtcaaaaaagacggcagaaagtgcagccggtaatgcagccagggatgcaacgaccgcagcagaaaaagcccgggagtcagcagaaagcgcacagtcagcggaacaaagcaggatagcggcggaagaagccgtaaaccgaatccccaccgtggtggggcctcccgggccaaagggggaaccggggcccgcgggtcctcaggggccgaagggagataaaggagagcgtggagacaccggcccggcaggggcaaccggcgaacggggaccggcaggtgatgctggtccggcaggcccgcaggggccgaaaggtgacaggggagagcggggagagaccggtctgacgggaaatgcaggtccacagggtccaaagggagataccggtgcggcaggcccggcaggcccacagggaccgaaaggagaaacaggtgcggctggcccggtgggggcaaccggacctcagggaccgaagggcgacccgggggagacgcaaatacggttccgtctggggccgggaaacattattgagacaaacagccatggctggttcccggatacagatggcgcactcatcaccggactgacctttcttgaccccaaagatgccacacgggttcagggtttttttcagcatttgcaggtcaggtttggtgacgggccgtggcaggatgtcaaggggctggatgaagtgggcagtgatacaggcagaacaggagaatga

SEQ ID NO: 174 - DNA, 1224 bp, Escherichia coli
atggcagtaaagatttcaggtgtactgaaagacggcacaggaaaaccggtagagaactgcaccattcaactgaaagccagacgtaacagcgccacggtggtggtgaacacggtggcctctgaaaatccggatgaagccggtcgttacagcatggacgttgagtacggtcagtacagcgttattctgttggtggaagggttcccgccgtcacatgccgggaccatcaccgtgtatgaagattctcaaccggggacgctgaatgattttctcggtgccatgtcggaggatgacgtccggccggaggcactgcgtcgttttgaactgatggtggaagaagcggcgcgtcacgctgaggaggcgaagaagaatgccggagaggcggagacgtccgcgaggaatgccggcatatcagccagtcaggcagaagagagcgcggcaaatgctgacacttcagcaggggatgcatcggagtcagcccggcaggcggcagaaagtgcagccgctgcaaagcagtcagaggaggcgtcctcgtcctcggcctctgcggccgctcaaaaagccagtgagtcatcacaaagtgcagcagatgctgagttgtcaaaaaagacggcagaaagtgcagccggtaatgcagccagggatgcaacgaccgcaacagaaaaagcccgggagtcagcagaaagcgcacagtcagcggaacaaagcaggatagcggcggaagaggccgtaaaccgaatccccacggtggtggggcctcccgggccaaagggggaaccgggtcccgcgggtcctcaggggccgaagggagataaaggagagcgtggagacaccggtccggcaggggcaaccggtgaaagggggccggcaggtgatgctggtccggcaggcccggcaggcccggcaggcccacagggaccgaaaggagaaacaggtgcggctggcccggtgggggcaaccggacctcaggggccgaagggcgacccgggggagacgcaaatacggttccgtctggggccgggaaacattattgagacaaacagccatggctggttcccggatacagatggcgcactcatcaccggactgacctttcttgaccccaaagatgccacacgggttcagggtttttttcagcatttgcaggtcaggtttggtgacgggccgtggcaggatgttaaggggctggatgaagtgggcagtgatacaggcagaacaggagaatga

SEQ ID NO: 175 - DNA, 1314 bp, Escherichia coli
atggcagtaaagatttcaggtgtactgaaagacggcacaggaaaaccggtagagaactgcaccattcaactgaaagccagacggaccagcagcacggtggtggtgaacacggtggcctctgaaaatccggatgaagccggtcgttacagcatggacgttgagtacggtcagtacagcgtcattctgttggtggaaggattcccgccgtcacatgccgggaccatcaccgtgtatgaagattctcaacccggtacgctgaatgattttctcggtgccatgtcggaggatgacgtccggccggaggcactgcgtcgttttgaactgatggtggaagaagcggcgcgtcacgctgaggaggcgaagaagaatgccggagaggcggagacgtccgcgaggaatgccggcatatcagccagtcaggcagaagagaacgctgcaaatgctgacacttcagcaggggatgcatcggagtcagcccggcaggcggcagaaagtgcagccgctgcaaagcagtcagaggaggcgtcctcgtcctcggcctctgcggccgctcaaaaagccagtgagtcatcacaaagtgcagcagaagctgaattgtcaagaaagacggcagaaagtgcagccggtaatgcatccagggatgcaacgaccgcagcagaaaaagcccgggagtcagcagaaagcgcacagtcagcggaacaaagcaggatagcggcggaagaagccgtaaacagaatccccaccgtggtgggacctcccgggccaaagggggaacaggggcccgcgggtcctcaggggccgaagggtgataagggagagcgcggtgacaccggccctgtcggggcaaccggcgaacggggaccggcaggtgatgctggtccggcaggcccgcaggggccgaaaggtgacaggggagagcggggagagaccggtctgacgggaaatgcaggtccacagggtccaaagggagataccggtgcggcaggcccggcaggcccacagggaccgaaaggagaaacaggtgcgactggcccggtgggggcaaccggacctcagggaccgaagggcgacccgggggagacacaaatccgttttcgtctggggccgggaaacattattgagacaaacagcaatggctggttcccggatacagatggcgcactcatcaccggactgacctttcttgcccccaaagatgccacacgggttcaggttttttttcagcatttgcaggtcaggtttggtgacgggccgtggcaggatgttaaggggctggatgaagtgggcagtgatacaggcagaacaggagaatga

SEQ ID NO: 176 - DNA, 1314 bp, Escherichia coli
atggcagtaaagatttcaggtgtactgaaagacggcacaggaaaaccggtagagaactgcaccattcaactgaaagccagacggaccagcagcacggtggtggtgaacacggtggcctctgaaaatccggatgaagccggtcgttacagcatggacgttgagtacggtcagtacagcgtcattctgttggtggaaggattcccgccgtcacatgccgggaccatcaccgtgtatgaagattctcaaccggggacgctgaatgattttctcggtgccatgtcggaggatgacgtccggccggaggcactgcgtcgctttgaactgatggtggaagaggtggcgcgtcacgctgaggaggcgaagaagaatgccggagaggcggagacgtcagcgaggaatgccggcatatcagccagtcaggcagaagagagcgctgcaaatgctgacacttcagcaggggaggcatcggagtcagcccggcaggcggcagaaagtgcagcctcagcaaagcagtcagaggatgcgtcctcgtcctcggcttctgcggccgctcaaaaagccagtgagtcatcacaaagtgcagcagaagctgaattgtcaagaaagacggcagaaagtgcagccggtaatgcagccagggatgcaacgaccgcaacagaaaaagcccgggagtcagcagaaagcgcacagtcagcggaacaaagcaggatagcggcggaagaagccgtaaacagaatccccaccgtggtgggacctcccgggccaaagggggaacaggggcccgcgggtcctcaggggccgaagggtgataagggagagcgcggtgacaccggccctgtcggggcaaccggcgaacggggaccggcaggtgatgctggtccggcaggcccgcaggggccgaaaggtgacaggggagagcggggagagaccggtctgacgggaaatgcaggtccacagggtccaaagggagataccggtgcggcaggcccggcaggcccacagggaccgaaaggagaaacaggtgcggctggcccggtgggggcaaccggacctcaggggccgaagggcgacccgggggagacacaaatccgttttcgtctggggccgggaaacattattgagacaaacagccatggctggttcccggatacagatggcgcactcatcaccggactgacctttcttgaccccaaagatgccacacgggttcagggtttttttcagcatttgcaggtcaggtttggtgacgggccgtggcaggatgtcaaggggctggatgaagtgggcagtgatacaggcagaacaggagaatga

SEQ ID NO: 177 - DNA, 1314 bp, Escherichia coli
atggcagtaaagatttcaggtgtactgaaagacggcacaggaaaaccggtagagaactgcaccattcaactgaaagccagacgtaacagcgccacggtggtggtgaacacggtggcctctgaaaatccggatgaagccggtcgttacagcatggacgttgagtacggtcagtacagcgtcattctgttggtggagggcttcccgccgtcacatgccgggaccatcaccgtgtatgaagattctcaaccggggacgctgaatgattttctcggtgccatgtcggaggatgacgtccggccggaggcactgcgtcgttttgaactgatggtggaagaagcggcgcgtcacgctgaggaggcgaagaagaatgccggagaggcggagacatcagcgaggaatgccggcatatcatccagtaaggcggaagcgagcgcggcaaatgctgacacttcagcaggggatgcattggagtcagcccggcaggcggcagaaagtgcagccgctgcaaagcagtcagaggatgcgtcctcgtcctcggcttctgcggccgctcaaaaagccagtgagtcatcacaaagtgcagcagaagctgaattgtcaagaaagacggcagaaagtgcagccggtaatgcagccagggatgcaacgaccgcaacagaaaaagcccgggagtcagcagaaagcgcacagtcagcggaacaaagcaggatagcggcggaagaggccgtaaaccgaatccccaccgtggtgggacctcccgggccaaagggggaacaggggcccgcgggtcctcaggggccgaagggtgataagggagagcgcggtgacaccggccctgtcggggcaaccggcgaacggggaccggcaggtgatgctggtccggcaggcccgcaggggccgaaaggtgacaggggagagcggggagagaccggtctgacgggaaatgcaggtccacagggtccaaagggagataccggtgcggcaggcccggcaggcccacagggaccgaaaggagaaacaggtgcggctggcccggtgggggcaaccggacctcagggaccgaagggcgacccgggggaggcacaaatccgttttcgtctggggccggcgagcattattgagacaaacagcaatggctggttcccggatacagatggcgcactcatcaccggactgacctttcttgaccccaaagatgccacacaggttcaggggctgtttcggcatttgcaggtcaggtttggtgacgggccgtggcaggatgttaaggggctggatgaagtgggcagtgatacaggcagaacaggagaatga

SEQ ID NO: 178 - DNA, 1329 bp, Escherichia coli
gtgggagtgggtatggcagcagtacaaatatcaggcgtgctgaaagatggtgcgggaaaaccaatacagaactgcaccattcaactgaaagccagacgtaacagcaccacggtggtggtgaacacggtggcctctgaaaatccggatgaggcagggcgttacagcatggacgtcgagtatggtcagtacagcgtcactctgttggtggagggattcccgccatcacatgccgggaccatcaccgtgtatgaagattctcaaccggggacgctgaatgattttctcggtgccatgtcggaggatgacgtccggccggaggcactgcgtcgttttgaactgatggtggaagaagcggcgcgtcacgctgaggaggcgaagaagaatgccggagaggcggagacgtccgcgaggaatgccggcatatcagccagtcaggcagaagagagcgcggcaaatgctgacacttcagcaggggatgcatcggagtcagcccggcaggcggcagaaagtgcagccgctgcaaagcagtcagaggaggcgtcctcgtcctcggcttctgcggccgctcaaaaagccagtgagtcatcacaaagtgcagcagaagctgaattgtcaagaaagacggcagaaagtgcagccggtaatgcagccagggatgcaacgaccgcaacagaaaaagcccgggaatcagcagaaagcgcacagtcagcggaacaaagcagaatagcggcggaagacgccgtaaacagaattcccaccgtggtggggcctcccggaccaaagggggaaccgggtcccgcgggtcctcaggggccgaagggagataaaggagagcgtggagacaccggtccggcaggggcaaccggtgaacggggaccgggaggagatacaggtccggcaggtccgcaggggccgaaaggcgacaggggagagcggggagagaccggtctgacaggaagtacaggtccacaggggccaaagggagataccggggcaacaggtccggcaggaccgcagggaccgaaaggggaaacaggtgcggctggcccggtgggggctaccggacctcagggggcgaagggcgacccgggggagacacaaatacggttccgtctggggccgatgagaattattgagacaaacagctatggctggttcccgggtacagatggtgcgctcatcaccggactgacctttcttgaccccaaagatgccacacaggttcaggggatgtttcagcatttgcaggtcagatttggtgacgggccatggcaggatgttaagggactggatgaagtgggcagtgatacaggcagaactggagaatga

SEQ ID NO: 179 - DNA, 1314 bp, Escherichia coli
atggcagtaaagatttcaggtgtactgaaagacggcacaggaaaaccggtagagaactgcaccattcaactgaaagccagacggaccagcagcacggtggtggtgaacacggtggcctctgaaaatccggatgaagccggtcgttacagcatggacgttgagtacggtcagtacagcgtcattctgttggtggaaggattcccgccgtcacatgccgggaccatcaccgtgtatgaagattctcaaccggggacgctgaatgattttctcggtgccatgtcggaggatgacgtccggccggaggcactgcgtcgttttgaactgatggtggaagaagcggcgcgtcacgctgaggaggcgaagaagaatgccggagaggcggagacgtccgcgaggaatgccggcatatcagccagtcaggcagaagagagcgcggcaaatgctgacacttcagcaggggatgcatcggagtcagcccggcaggcggcagaaagtgcagccgctgcaaagcagtcagaggaggcgtcctcgtcctcggcttctgcggccgctcaaaaagccagtgagtcatcacaaagtgcagcagaagctgaattgtcaagaaagacggcagaaagtgcagccggtaatgcagccagggatgcaacgaccgcaacagaaaaagcccgggagtcagcagaaagcgcacagtcagcggaacaaagcaggatagcggcggaagaagccgtaaaccgaatccccaccgtggtgggacctcccgggccaaagggggaaccgggtcccgcgggtcctcaggggccgaagggagataaaggagagcgtggcgacaccggcccggcaggggcaaccggcgaacggggaccggcaggtgatgctggtccggcaggcccgcaggggccgaaaggtgacaggggagagcggggagagaccggtctgacgggaaatgcaggtccacagggtccaaagggagacaccggggcagcaggcccggcaggcccacagggaccgaaaggagaaacaggtgcggctggcccggtgggggcaaccggacctcagggaccgaagggcgacccgggggagacacaaatccgttttcgtctggggccggcgagcattattgagacaaacagccatggctggttcccgggtacagatggtgcgctcatcaccggactgacctttcttgcccccaaagatgccacacgggttcaggttttttttcagcatttgcaggtcaggtttggtgacgggccgtggcaggatgttaaggggctggatgaagtgggcagtgatacaggcagaacaggagaatga

SEQ ID NO: 180 - DNA, 1314 bp, Escherichia coli
atggcagtaaagatttcaggtgtactgaaagacggcacaggaaaaccggtagagaactgcaccattcaactgaaagccagacgtaacagcgccacggtggtggtgaacacggtggcctctgaaaatccggatgaagccggtcgttacagcatggacgttgagtacggtcagtacagcgttattctgttggtggaagggttcccgccgtcacatgccgggaccatcaccgtgtatgaagattctcaaccggggacgctgaatgattttctcggtgccatgtcggaggatgacgtccggccggaggcactgcgccgttttgaactgatggtggaagaagcggcgcgtcacgctgaggaggcgaagaagaatgccggagaggcggagacgtccgcgaggaatgccggcatatcagccagtcaggcagaagagagcgcggcaaatgctgacacttcagcaggggatgcatcggagtcagcccggcaggcggcagaaagtgcagccgctgcaaagcagtcagaggaggcgtcctcgtcctcggcctctgcggccgctcaaaaagccagtgagtcattacaaagtgcaacagatgctgagttgtcaaaaaagacggcagaaagtgcagccggtaatgcagccagggatgcaacgaccgcagcagaaaaagcccgggagtcagcagaaagcgcacagtcagcggaacaaagcaggatagcggcggaagaagccgtaaaccgaatccccaccgtggtggggcctcccgggccaaagggggaaccggggcccgcgggtcctcaggggccgaagggagataaaggagagcgtggagacaccggcccggcaggggcaaccggcgaacggggaccggcaggtgatgctggtccggcaggcccgcaggggccgaaaggtgacaggggagagcggggagagaccggtctgacgggaaatgcaggtccacagggtccaaagggagataccggtgcggcaggcccggcaggcccacagggaccgaaaggagaaacaggtgcggctggcccggtgggggcaaccggacctcaggggccgaagggcgacccgggggagacgcaaatacggttccgtctggggccgggaaacattattgagacaaacagcaatggctggttcccggatacagatggtgcgctcatcaccggactgacctttcttgaccccaaagataccacacaggttcaggggctgtttcggcatttgcaggtcaggtttggtgacgggccgtggcaggatgttaaggggctgaatgaagtgggcagtgatacaggcagaacaggagaatga

SEQ ID NO: 181 - DNA, 1296 bp, Escherichia coli
atggcagtaaagatttcaggtgtactgaaagacggcacaggaaaaccggtagagaactgcaccattcaactgaaagccagacggaccagcagcacggtggtggtgaacacggtggcctctgaaaatccggatgaagccggtcgttacagcatggacgttgagtacggtcagtacagcgtcattctgttggtggagggcttcccgccgtcacatgccgggaccatcaccgtgtatgaagattctcaaccggggacgctgaatgattttctcggtgccatgtcggaggatgacgtccggccggaggcactgcgtcgttttgaactgatggtggaagaagcggcgcgtcacgctgaggaggcgaagaagaatgccggagaggcggagacatcagcgaggaatgccggcatatcatccagtaaggcggaagcgagcgcggcaaatgctgacacttcagcaggggatgcattggagtcagcccggcaggcggcagaaagtgcagccgctgcaaagcagtcagaggatgcgtcctcgtcctcggcttctgcggccgctcaaaaagccagtgagtcatcacaaagtgcagcagaagctgaattgtcaagaaagacggcagaaagtgcagccggtaatgcagccagggatgcaacgaccgcaacagaaaaagcccgggagtcagcagaaagcgcacagtcagcggaacaaagcaggatagcggcggaagaggccgtaaaccgaatccccaccgtggtgggacctcccgggccaaagggggaacaggggcccgcgggtcctcaggggccgaagggtgataagggagagcgcggtgacaccggccctgtcggggcaaccggcgaacggggaccggcaggtgatgctggtccggcaggcccgcaggggccgaaaggtgacaggggagagcggggagagaccggtctgacgggaaatgcaggtccacagggtccaaagggagataccggtgcggcaggcccggcaggcccacagggaccgaaaggagaaacaggtgcggctggcccggtgggggcaaccggacctcaggggccgaagggcgacccgggggagacgcaaatacggttccgtctggggccgggaaacattattgagacaaacagcaatggctggttcccggatacagatggtgcgctcatcaccggactgacctttcttgcccccaaagataccacacgggttcagggtttttttcagcatttgcaggtcaggtttggtgacgggccgtggcaggatgttaaggggctggatgaagtgggcagtgataca

SEQ ID NO: 182 - DNA, 1305 bp, Escherichia coli
atgacagtaaaaatttctggcgtgcttaaagatggcacaggaaaaccagtacagaactgcaccattgtgctgaaggccagacgaaccagcagcacggtggtggtgaacacggtggcctctgaaaatccggatgaagccggacgttacagcatggatgttgagtacggtcagtacagcgtcattctgttggtggagggatttcctccgtcacatgccgggaccatcaccgtgtatgaagattctcaacccggtacgctgaatgattttctcggtgccatgtcggaggatgacgtccggccggaggcactgcgtcgttttgaactgatggtggaagaagcggcgcgtcacgctgaggaggcgaagaagaatgccggagaggcggagacgtccgcgaggaatgccggcatatcagccagtcaggcagaagagaacgctgcaaatgctgacacttcagcaggggatgcatcggagtcagcccggcaggcggcagaaagtgcagccgctgcaaagcagtcagaggaggcgtcctcgtcctcggcctctgcggccgctcaaaaagccagtgagtcattacaaagtgcaacagatgctgagttgtcaaaaaagacggcagaaagtgcagccggtaatgcagccagggatgcaacgaccgcagcagaaaaagcccgggagtcagcagaaagcgcacagtcagcggaacaaagcaggatagcggcggaagaagccgtaaaccgaatccccaccgtggtggggcctcccgggccaaagggggaaccggggcccgcgggtcctcaggggccgaagggagataaaggagagcgtggagacaccggcccggcaggggcaaccggcgaacggggaccggcaggtgatgctggtccggcaggcccgcaggggccgaaaggtgacaggggagagaccggtctgacgggaaatgcaggtccacagggtccaaagggagacaccggggcagcaggcccggcaggcccacagggaccgaaaggagaaacaggtgcggctggcccggtgggggcaaccggacctcagggaccgaagggcgacccgggggagacacaaatccgttttcgtctggggccggcgagcattattgagacaaacagccatggctggttcccgggtacagatggtgcgctcatcaccggactgacctttcttgcccccaaagataccacacgggttcagggtttttttcagcatttgcaggtcaggtttggtgacgggccgtggcaggatgttaaggggcttgatgaagtgggcagtgatacaggcagaacaggagaatga

SEQ ID NO: 183 - DNA, 1314 bp, Escherichia coli; identical to SEQ ID NO: 179

SEQ ID NO: 184 - DNA, 1314 bp, Escherichia coli; identical to SEQ ID NO: 177

SEQ ID NO: 185 - DNA, 1317 bp, Escherichia coli
atggcagcagtacaaatatcaggcgtgctgaaagatggtgcgggaaaaccaatacagaactgcaccattcaactgaaagccagacgtaacagcaccacggtggtggtgaacacggtggcctctgaaaatccggatgaggcagggcgttacagcatggacgtcgagtatggtcagtacagcgtcactctgttggtggagggattcccgccatcacatgccgggaccatcaccgtgtatgaagattctcaaccggggacgctgaatgattttctcggtgccatgtcggaggatgacgtccggccggaggcactgcgtcgttttgaactgatggtggaagaagcggcgcgtcacgctgaggaggcgaagaagaatgccggagaggcggagacgtccgcgaggaatgccggcatatcagccagtcaggcagaagagagcgcggcaaatgctgacacttcagcaggggatgcatcggagtcagcccggcaggcggcagaaagtgcagccgctgcaaagcagtcagaggaggcgtcctcgtcctcggcttctgcggccgctcaaaaagccagtgagtcatcacaaagtgcagcagaagctgaattgtcaagaaagacggcagaaagtgcagccggtaatgcagccagggatgcaacgaccgcaacagaaaaagcccgggaatcagcagaaagcgcacagtcagcggaacaaagcagaatagcggcggaagacgccgtaaacagaattcccaccgtggtggggcctcccggaccaaagggggaaccgggtcccgcgggtcctcaggggccgaagggagataaaggagagcgtggagacaccggtccggcaggggcaaccggtgaacggggaccgggaggagatacaggtccggcaggtccgcaggggccgaaaggcgacaggggagagcggggagagaccggtctgacaggaagtacaggtccacaggggccaaagggagataccggggcaacaggtccggcaggaccgcagggaccgaaaggggaaacaggtgcggctggcccggtgggggctaccggacctcagggggcgaagggcgacccgggggagacacaaatacggttccgtctggggccgatgagaattattgagacaaacagctatggctggttcccgggtacagatggtgcgctcatcaccggactgacctttcttgaccccaaagatgccacacaggttcaggggatgtttcagcatttgcaggtcagatttggtgacgggccatggcaggatgttaagggactggatgaagtgggcagtgatacaggcagaactggagaatga

SEQ ID NO: 186 - DNA, 1314 bp, Escherichia coli; identical to SEQ ID NO: 176

SEQ ID NO: 187 - DNA, 1224 bp, Escherichia coli
atggcagtaaagatttcaggtgtactgaaagacggcacaggaaaaccggtagagaactgcaccattcaactgaaagccagacggaccagcagcacggtggtggtgaacacggtggcctctgaaaatccggatgaagccggtcgttacagcatggacgttgagtacggtcagtacagcgtcattctgttggtggaagggttcccgccgtcacatgccgggaccatcaccgtgtatgaagattctcaaccggggacgctgaatgattttctcggtgccatgtcggaggatgacgtccggccggaggcactgcgtcgttttgaactgatggtggaagaagcggcgcgtcacgctgaggaggcgaagaagaatgccggagaggcggagacgtccgcgaggaatgccggcatatcagccagtcaggcagaagagagcgcggcaaatgctgacacttcagcaggggatgcatcggagtcagcccggcaggcggcagaaagtgcagccgctgcaaagcagtcagaggaggcgtcctcgtcctcggcctctgcggccgctcaaaaagccagtgagtcatcacaaagtgcagcagatgctgagttgtcaaaaaagacggcagaaagtgcagccggtaatgcagccagggatgcaacgaccgcaacagaaaaagcccgggagtcagcagaaagcgcacagtcagcggaacaaagcaggatagcggcggaagaggccgtaaaccgaatccccacggtggtggggcctcccgggccaaagggggaaccgggtcccgcgggtcctcaggggccgaagggagataaaggagagcgtggagacaccggtccggcaggggcaaccggtgaaagggggccggcaggtgatgctggtccggcaggcccggcaggcccggcaggcccacagggaccgaaaggagaaacaggtgcggctggcccggtgggggcaaccggacctcaggggccgaagggcgacccgggggagacgcaaatacggttccgtctggggccgggaaacattattgagacaaacagccatggctggttcccggatacagatggcgcactcatcaccggactgacctttcttgaccccaaagatgccacacgggttcagggtttttttcagcatttgcaggtcaggtttggtgacgggccgtggcaggatgttaaggggctggatgaagtgggcagtgatacaggcagaacaggagaatga

SEQ ID NO: 188 - DNA, 1314 bp, Escherichia coli; identical to SEQ ID NO: 180

SEQ ID NO: 189 - DNA, 1305 bp, Escherichia coli; identical to SEQ ID NO: 182

SEQ ID NO: 190 - DNA, 1317 bp, Escherichia coli; identical to SEQ ID NO: 185

SEQ ID NO: 191 - DNA, 1314 bp, Escherichia coli; identical to SEQ ID NO: 175

SEQ ID NO: 192 - DNA, 1356 bp, Escherichia coli
atgacagcccgccggttcaggcggcttttttgtggggtgaatatggcagtaaagatttcaggtgtactgaaagacggcacaggaaaaccggtagagaactgcaccattcaactgaaagccagacggaccagcagcacggtggtggtgaacacggtggcctctgaaaatccggatgaagccggtcgttacagcatggacgttgagtacggtcagtacagcgtcattctgttggtggaaggattcccgccgtcacatgccgggaccatcaccgtgtatgaagattctcaaccggggacgctgaatgattttctcggtgccatgtcggaggatgacgtccggccggaggcactgcgtcgttttgaactgatggtggaagaagcggcgcgtcacgctgaggaggcgaagaagaatgccggagaggcggagacgtccgcgaggaatgccggcatatcagccagtcaggcagaagagagcgcggcaaatgctgacacttcagcaggggatgcatcggagtcagcccggcaggcggcagaaagtgcagccgctgcaaagcagtcagaggaggcgtcctcgtcctcggcttctgcggccgctcaaaaagccagtgagtcatcacaaagtgcagcagaagctgaattgtcaagaaagacggcagaaagtgcagccggtaatgcagccagggatgcaacgaccgcaacagaaaaagcccgggagtcagcagaaagcgcacagtcagcggaacaaagcaggatagcggcggaagaagccgtaaaccgaatccccaccgtggtgggacctcccgggccaaagggggaaccgggtcccgcgggtcctcaggggccgaagggagataaaggagagcgtggcgacaccggcccggcaggggcaaccggcgaacggggaccggcaggtgatgctggtccggcaggcccgcaggggccgaaaggtgacaggggagagcggggagagaccggtctgacgggaaatgcaggtccacagggtccaaagggagacaccggggcagcaggcccggcaggcccacagggaccgaaaggagaaacaggtgcggctggcccggtgggggcaaccggacctcagggaccgaagggcgacccgggggagacacaaatccgttttcgtctggggccggcgagcattattgagacaaacagccatggctggttcccgggtacagatggtgcgctcatcaccggactgacctttcttgcccccaaagatgccacacgggttcaggttttttttcagcatttgcaggtcaggtttggtgacgggccgtggcaggatgttaaggggctggatgaagtgggcagtgatacaggcagaacaggagaatga

SEQ ID NO: 193 - DNA, 1314 bp, Escherichia coli; identical to SEQ ID NO: 173

SEQ ID NO: 194 - DNA, 1224 bp, Escherichia coli; identical to SEQ ID NO: 174

SEQ ID NO: 195 - DNA, 1320 bp, Escherichia coli
gtgaatatggcagtaaagatttcaggtgtactgaaagacggcacaggaaaaccggtagagaactgcaccattcaactgaaagccagacggaccagcagcacggtggtggtgaacacggtggcctctgaaaatccggatgaagccggtcgttacagcatggacgttgagtacggtcagtacagcgtcattctgttggtggagggcttcccgccgtcacatgccgggaccatcaccgtgtatgaagattctcaaccggggacgctgaatgattttctcggtgccatgtcggaggatgacgtccggccggaggcactgcgtcgttttgaactgatggtggaagaagcggcgcgtcacgctgaggaggcgaagaagaatgccggagaggcggagacatcagcgaggaatgccggcatatcatccagtaaggcggaagcgagcgcggcaaatgctgacacttcagcaggggatgcattggagtcagcccggcaggcggcagaaagtgcagccgctgcaaagcagtcagaggatgcgtcctcgtcctcggcttctgcggccgctcaaaaagccagtgagtcatcacaaagtgcagcagaagctgaattgtcaagaaagacggcagaaagtgcagccggtaatgcagccagggatgcaacgaccgcaacagaaaaagcccgggagtcagcagaaagcgcacagtcagcggaacaaagcaggatagcggcggaagaggccgtaaaccgaatccccaccgtggtgggacctcccgggccaaagggggaacaggggcccgcgggtcctcaggggccgaagggtgataagggagagcgcggtgacaccggccctgtcggggcaaccggcgaacggggaccggcaggtgatgctggtccggcaggcccgcaggggccgaaaggtgacaggggagagcggggagagaccggtctgacgggaaatgcaggtccacagggtccaaagggagataccggtgcggcaggcccggcaggcccacagggaccgaaaggagaaacaggtgcggctggcccggtgggggcaaccggacctcaggggccgaagggcgacccgggggagacgcaaatacggttccgtctggggccgggaaacattattgagacaaacagcaatggctggttcccggatacagatggtgcgctcatcaccggactgacctttcttgcccccaaagataccacacgggttcagggtttttttcagcatttgcaggtcaggtttggtgacgggccgtggcaggatgttaaggggctggatgaagtgggcagtgatacaggcagaacaggagaatga

SEQ ID NO: 196 - DNA, 1314 bp, Escherichia coli; identical to SEQ ID NO: 176

SEQ ID NO: 197 - DNA, 1314 bp, Escherichia coli; identical to SEQ ID NO: 180

SEQ ID NO: 198 - DNA, 1305 bp, Escherichia coli; identical to SEQ ID NO: 182

SEQ ID NO: 199 - DNA, 1314 bp, Escherichia coli; identical to SEQ ID NO: 175

SEQ ID NO: 200 - DNA, 1314 bp, Escherichia coli; identical to SEQ ID NO: 177

SEQ ID NO: 201 - DNA, 1317 bp, Escherichia coli; identical to SEQ ID NO: 185

SEQ ID NO: 202 - DNA, 1314 bp, Escherichia coli
atggcagtaaagatttcaggtgtactgaaagacggcacaggaaaaccggtagagaactgcaccattcaactgaaagccagacgtaacagcgccacggtggtggtgaacacggtggcctctgaaaatccggatgaagccggtcgttacagcatggacgttgagtacggtcagtacagcgttattctgttggtggaagggttcccgccgtcacatgccgggaccatcaccgtgtatgaagattctcaaccggggacgctgaatgattttctcggtgccatgtcggaggatgacgtccggccggaggcactgcgccgttttgaactgatggtggaagaagcggcgcgtcacgctgaggaggcgaagaagaatgccggagaggcggagacgtccgcgaggaatgccggcatatcagccagtcaggcagaagagagcgcggcaaatgctgacacttcagcaggggatgcatcggagtcagcccggcaggcggcagaaagtgcagccgctgcaaagcagtcagaggaggcgtcctcgtcctcggcctctgcggccgctcaaaaagccagtgagtcattacaaagtgcaacagatgctgagttgtcaaaaaagacggcagaaagtgcagccggtaatgcagccagggatgcaacgaccgcagcagaaaaagcccgggagtcagcagaaagcgcacagtcagcggaacaaagcaggatagcggcggaagaagccgtaaaccgaatccccaccgtggtggggcctcccgggccaaagggggaaccggggcccgcgggtcctcaggggccgaagggtgataagggagagcgcggtgacaccggccctgtcggggcaaccggcgaacggggaccggcaggtgatgctggtccggcaggcccgcaggggccgaaaggtgacaggggagagcggggagagaccggtctgacgggaaatgcaggtccacagggtccaaagggagataccggtgcggcaggcccggcaggcccacagggaccgaaaggagaaacaggtgcggctggcccggtgggggcaaccggacctcaggggccgaagggcgacccgggggagacgcaaatacggttccgtctggggccgggaaacattattgagacaaacagcaatggctggttcccggatacagatggtgcgctcatcaccggactgacctttcttgcccccaaagataccacacgggttcagggtttttttcagcatttgcaggtcaggtttggtgacgggccgtggcaggatgttaaggggctggatgaagtgggcagtgatacaggcagaacaggagaatga

SEQ ID NO: 203 - DNA, 1224 bp, Escherichia coli; identical to SEQ ID NO: 174

SEQ ID NO: 204 - DNA, 1305 bp, Escherichia coli; identical to SEQ ID NO: 182

SEQ ID NO: 205 - DNA, 1314 bp, Escherichia coli; identical to SEQ ID NO: 180

SEQ ID NO: 206 - DNA, 1314 bp, Escherichia coli; identical to SEQ ID NO: 173

SEQ ID NO: 207 - DNA, 1317 bp, Escherichia coli; identical to SEQ ID NO: 185

SEQ ID NO: 208 - DNA, 1356 bp, Escherichia coli; identical to SEQ ID NO: 192

SEQ ID NO: 209 - DNA, 1314 bp, Escherichia coli
atggcagtaaagatttcaggtgtactgaaagacggcacaggaaaaccggtagagaactgcaccattcaactgaaagccagacgtaacagcgccacggtggtggtgaacacggtggcctctgaaaatccggatgaagccggtcgttacagcatggacgttgagtacggtcagtacagcgttattctgttggtggaagggttcccgccgtcacatgccgggaccatcaccgtgtatgaagattctcaaccggggacgctgaatgattttctcggtgccatgtcggaggatgacgtccggccggaggcactgcgtcgttttgaactgatggtggaagaagcggcgcgtcacgctgaggaggcgaagaagaatgccggagaggcggagacgtccgcgaggaatgccggcatatcagccagtcaggcagaagagagcgcggcaaatgctgacacttcagcaggggatgcatcggagtcagcccggcaggcggcagaaagtgcagccgctgcaaagcagtcagaggaggcgtcctcgtcctcggcctctgcggccgctcaaaaagccagtgagtcattacaaagtgcaacagatgctgagttgtcaaaaaagacggcagaaagtgcagccggtaatgcagccagggatgcaacgaccgcagcagaaaaagcccgggagtcagcagaaagcgcacagtcagcggaacaaagcaggatagcggcggaagaagccgtaaaccgaatccccaccgtggtggggcctcccgggccaaagggggaaccggggcccgcgggtcctcaggggccgaagggagataaaggagagcgtggagacaccggcccggcaggggcaaccggcgaacggggaccggcaggtgatgctggtccggcaggcccgcaggggccgaaaggtgacaggggagagcggggagagaccggtctgacgggaaatgcaggtccacagggtccaaagggagataccggtgcggcaggcccggcaggcccacagggaccgaaaggagaaacaggtgcggctggcccggtgggggcaaccggacctcagggaccgaagggcgacccgggggagacgcaaatacggttccgtctggggccgggaaacattattgagacaaacagccatggctggttcccggatacagatggcgcactcatcaccggactgacctttcttgaccccaaagatgccacacgggttcagggtttttttcagcatttgcaggtcaggtttggtgacgggccgtggcaggatgtcaaggggctggatgaagtgggcagtgatacaggcagaacaggagaatga

SEQ ID NO: 210 - DNA, 1314 bp, Escherichia coli; identical to SEQ ID NO: 180

SEQ ID NO: 211 - DNA, 1305 bp, Escherichia coli; identical to SEQ ID NO: 182

SEQ ID NO: 212 - DNA, 1224 bp, Escherichia coli; identical to SEQ ID NO: 174

SEQ ID NO: 213 - DNA, 1224 bp, Escherichia coli; identical to SEQ ID NO: 174

SEQ ID NO: 214 - DNA, 1314 bp, Escherichia coli
atggcagtaaagatttcaggtgtactgaaagacggcacaggaaaaccggtagagaactgcaccattcaactgaaagccagacgtaacagcgccacggtggtggtgaacacggtggcctctgaaaatccggatgaagccggtcgttacagcatggacgttgagtacggtcagtacagcgttattctgttggtggaagggttcccgccgtcacatgccgggaccatcaccgtgtatgaagattctcaaccggggacgctgaatgattttctcggtgccatgtcggaggatgacgtccggccggaggcactgcgtcgttttgaactgatggtggaagaagcggcgcgtcacgctgaggaggcgaagaagaatgccggagaggcggagacgtccgcgaggaatgccggcatatcagccagtcaggcagaagagagcgcggcaaatgctgacacttcagcaggggatgcattggagtcagcccggcaggcggcagaaagtgcagccgctgcaaagcagtcagaggaggcgtcctcgtcctcggcttctgcggccgctcaaaaagccagtgagtcatcacaaagtgcagcagaagctgaattgtcaagaaagacggcagaaagtgcagccggtaatgcagccagggatgcaacgaccgcaacagaaaaagcccgggagtcagcagaaagcgcacagtcagcggaacaaagcaggatagcggcggaagaggccgtaaaccgaatccccaccgtggtgggacctcccgggccaaagggggaacaggggcccgcgggtcctcaggggccgaagggtgataagggagagcgcggtgacaccggccctgtcggggcaaccggcgaacggggaccggcaggtgatgctggtccggcaggcccgcaggggccgaaaggtgacaggggagagcggggagagaccggtctgacgggaaatgcaggtccacagggtccaaagggagataccggtgcggcaggcccggcaggcccacagggaccgaaaggagaaacaggtgcggctggcccggtgggggcaaccggacctcagggaccgaagggcgacccgggggagacacaaatccgttttcgtctggggccggcgagcattattgagacaaacagcaatggctggttcccggatacagatggcgcactcatcaccggactgacctttcttgaccccaaagatgccacacaggttcaggggctgtttcggcatttgcaggtcaggtttggtgacgggccgtggcaggatgttaaggggctggatgaagtgggcagtgatacaggcagaacaggagaatga

SEQ ID NO: 215 - DNA, 1314 bp, Escherichia coli
atggcagtaaagatttcaggtgtactgaaagacggcacaggaaaaccggtagagaactgcaccattcaactgaaagccagacggaccagcagcacggtggtggtgaacacggtggcctctgaaaatccggatgaagccggtcgttacagcatggacgttgagtacggtcagtacagcgtcattctgttggtggaaggattcccgccgtcacatgccgggaccatcaccgtgtatgaagattctcaacccggtacgctgaatgattttctcggtgccatgtcggaggatgacgtccggccggaggcactgcgtcgttttgaactgatggtggaagaagcggcgcgtcacgctgaggaggcgaagaagaatgccggagaggcggagacgtccgcgaggaatgccggcatatcagccagtcaggcagaagagagcgctgcaaatgctgacacttcagcaggggatgcatcggagtcagcccggcaggcggcagaaagtgcagccgctgcaaagcagtcagaggatgcgtcctcgtcctcggcttctgcggccgctcaaaaagccagtgagtcatcacaaagtgcagcagaagctgaattgtcaagaaagacggcagaaagtgcagccggtaatgcagccagggatgcaacgaccgcaacagaaaaagcccgggagtcagcagaaagcgcacagtcagcggaacaaagcaggatagcggcggaagaggccgtaaaccgaatccccaccgtggtgggacctcccgggccaaagggggaacaggggcccgcgggtcctcaggggccgaagggtgataagggagagcgcggtgacaccggccctgtcggggcaaccggcgaacggggaccggcaggtgatgctggtccggcaggcccgcaggggccgaaaggtgacaggggagagcggggagagaccggtctgacgggaaatgcaggtccacagggtccaaagggagataccggtgcggcaggcccggcaggcccacagggaccgaaaggagaaacaggtgcggctggcccggtgggggcaaccggacctcagggaccgaagggcgacccgggggagacacaaatccgttttcgtctggggccgggaaacattattgagacaaacagcaatggctggttcccggatacagatggcgcactcatcaccggactgacctttcttgcccccaaagatgccacacgggttcagggtttttttcagcatttgcaggtcaggtttggtgacgggccgtggcaggatgttaaggggctggatgaagtgggcagtgatacaggcagaacaggagaatga

SEQ ID NO: 216 - DNA, 1314 bp, Escherichia coli
atggcagtaaagatttcaggtgtactgaaagacggcacaggaaaaccggtagagaactgcaccattcaactgaaagccagacgtaacagcgccacggtggtggtgaacacggtggcctctgaaaatccggatgaagccggtcgttacagcatggacgttgagtacggtcagtacagcgttattctgttggtggaagggttcccgccgtcacatgccgggaccatcaccgtgtatgaagattctcaaccggggacgctgaatgattttctcggtgccatgtcggaggatgacgtccggccggaggcactgcgtcgttttgaactgatggtggaagaagcggcgcgtcacgctgaggaggcgaagaagaatgccggagaggcggagacgtccgcgaggaatgccggcatatcagccagtcaggcagaagagagcgcggcaaatgctgacacttcagcaggggatgcatcggagtcagcccggcaggcggcagaaagtgcagccgctgcaaagcagtcagaggaggcgtcctcgtcctcggcttctgcggccgctcaaaaagccagtgagtcatcacaaagtgcagcagaagctgaattgtcaagaaagacggcagaaagtgcagccggtaatgcagccagggatgcaacgaccgcaacagaaaaagcccgggagtcagcagaaagcgcacagtcagcggaacaaagcaggatagcggcggaagaggccgtaaaccgaatccccacggtggtggggcctcccgggccaaagggggaaccgggtcccgcgggtcctcaggggccgaagggagataaaggagagcgtggagacaccggcccggcaggggcaaccggcgaacggggaccggcaggtgatgctggtccggcaggcccgcaggggccgaaaggtgacaggggagagcggggagagaccggtctgacgggaaatgcaggtccacagggtccaaagggagacaccggggcagcaggcccggcaggcccacagggaccgaaaggagaaacaggtgcggctggcccggtgggggcaaccggacctcagggaccgaagggcgacccgggggagacacaaatccgttttcgtctggggccggcgagcattattgagacaaacagccatggctggttcccgggtacagatggtgcgctcatcaccggactgacctttcttgcccccaaagatgccacacgggttcaggttttttttcagcatttgcaggtcaggtttggtgacgggccgtggcaggatgttaaggggctggatgaagtgggcagtgatacaggcagaacaggagaatga

SEQ ID NO: 217 - DNA, 1317 bp, Escherichia coli
atggcagcagtacaaatatcaggcgtgctgaaagatggtgcgggaaaaccaatacagaactgcaccattcaactgaaagccagacgtaacagcaccacggtggtggtgaacacggtggcctctgaaaatccggatgaggcagggcgttacagcatggacgtcgagtatggtcagtacagcgtcactctgttggtggagggattcccgccatcacatgccgggaccatctccgtgtatgaagattctcaaccgggtacgctgaatgattttctcggtgccatgacggaggatgatgcccgtccggaggcactgcgtcgttttgaacagatggtggaagaagcagcgcgtcacgcagaggaggcgaagaagaatgccggagaagcagagacgtccgcgaggaatgccggcatatcagccagtaaggcggaagcgagcgccgcaaatgctgatacttcagcagaggatgcatcggagtcagcccggcaggcggcagaaagtgcagcctctgcaaagaagtcagaggaagcgtcctcgtcctcagcctctgaggccgctcaaaaagccagtgagtcattacaaagtgcaacagatgccgagttgtcaaaaaagacggcagaaagtgcagccggtaatgcagccagggatgcaacgacctcaacagaaaaagcccgggaatcagcagaaagcgcacagtcagcggaacaaagcagaatagcggcggaagacgccgtaaacagaattcccaccgtggtggggcctcccggaccaaagggggaaccgggtcccgcgggtcctcaggggccgaagggagataaaggagagcgtggagacaccggtccggcaggggcaaccggtgaacggggaccgggaggagatacaggtccggcaggtccgcaggggccgaaaggcgacaggggagagcggggagagaccggtctgacaggaagtacaggtccacaggggccaaagggagataccggggcaacaggtccggcaggaccgcagggaccgaaaggggaaacaggtgcggctggcccggtgggggctaccggacctcagggggcgaagggcgacccgggggagacacaaatacggttccgtctggggccgatgagaattattgagacaaacagctatggctggttcccgggtacagatggtgcgctcatcaccggactgacctttcttgaccccaaagatgccacacaggttcaggggatgtttcagcatttgcaggtcagatttggtgacgggccatggcaggatgttaagggactggatgaagtgggcagtgatacaggcagaactggagaatga

SEQ ID NO: 218 - DNA, 1314 bp, Escherichia coli
atggcagtaaagatttcaggtgtactgaaagacggcacaggaaaaccggtagagaactgcaccattcaactgaaagccagacgtaacagcgccacggtggtggtgaacacggtggcctctgaaaatccggatgaagccggtcgttacagcatggacgttgagtacggtcagtacagcgttattctgttggtggaagggttcccgccgtcacatgccgggaccatcaccgtgtatgaagattctcaaccggggacgctgaatgattttctcggtgccatgtcggaggatgacgtccggccggaggcactgcgtcgttttgaactgatggtggaagaagcggcgcgtcacgctgaggaggcgaagaagaatgccggagaggcggagacgtccgcgaggaatgccggcatatcagccagtcaggcagaagagagcgcggcaaatgctgacacttcagcaggggatgcatcggagtcagcccggcaggcggcagaaagtgcagccgctgcaaagcagtcagaggaggcgtcctcgtcctcggcctctgcggccgctcaaaaagccagtgagtcatcacaaagtgcagcagatgctgagttgtcaaaaaagacggcagaaagtgcagccggtaatgcagccagggatgcaacgaccgcaacagaaaaagcccgggagtcagcagaaagcgcacagtcagcggaacaaagcaggatagcggcggaagaggccgtaaaccgaatccccacggtggtggggcctcccgggccaaagggggaaccgggtcccgcgggtcctcaggggccgaagggtgataagggagagcgcggtgacaccggccctgtcggggcaaccggcgaacggggaccggcaggtgatgctggtccggcaggcccgcaggggccgaaaggtgacaggggagagcggggagagaccggtctgacgggaaatgcaggtccacagggtccaaagggagacaccggggcagcaggcccggcaggcccacagggaccgaaaggagaaacaggtgcggctggcccggtgggggcaaccggacctcagggaccgaagggcgacccgggggagacacaaatccgttttcgtctggggccggcgagcattattgagacaaacagccatggctggttcccgggtacagatggtgcgctcatcaccggactgacctttcttgcccccaaagataccacacgggttcagggtttttttcagcatttgcaggtcaggtttggtgacgggccgtggcaggatgttaaggggctggatgaagtgggcagtgatacaggcagaacaggagaatga

SEQ ID NO: 219 - DNA, 1314 bp, Escherichia coli
atgacagtaaaaatttctggcgtgcttaaagatggcacaggaaaaccagtacagaactgcaccattgtgctgaaggccagacgaaccagcagcacggtggtggtgaacacggtggcctctgaaaatccggatgaagccggacgttacagcatggatgttgagtacggtcagtacagcgtcattctgttggtggagggatttcctccgtcacatgccgggaccatcaccgtgtatgaagattctcaacccggtacgctgaatgattttctcggtgccatgtcggaggatgacgtccggccggaggcactgcgtcgttttgaactgatggtggaagaagcggcgcgtcacgctgaggaggcgaagaagaatgccggagaggcggagacgtccgcgaggaatgccggcatatcagccagtcaggcagaagagaacgctgcaaatgctgacacttcagcaggggatgcatcggagtcagcccggcaggcggcagaaagtgcagccgctgcaaagcagtcagaggaggcgtcctcgtcctcggcctctgcggccgctcaaaaagccagtgagtcattacaaagtgcaacagatgctgagttgtcaaaaaagacggcagaaagtgcagccggtaatgcagccagggatgcaacgaccgcagcagaaaaagcccgggagtcagcagaaagcgcacagtcagcggaacaaagcaggatagcggcggaagaagccgtaaaccgaatccccaccgtggtggggcctcccgggccaaagggggaaccggggcccgcgggtcctcaggggccgaagggagataaaggagagcgtggagacaccggcccggcaggggcaaccggcgaacggggaccggcaggtgatgctggtccggcaggcccgcaggggccgaaaggtgacaggggagagcggggagagaccggtctgacgggaaatgcaggtccacagggtccaaagggagacaccggggcagcaggcccggcaggcccacagggaccgaaaggagaaacaggtgcggctggcccggtgggggcaaccggacctcagggaccgaagggcgacccgggggagacacaaatccgttttcgtctggggccggcgagcattattgagacaaacagccatggctggttcccgggtacagatggtgcgctcatcaccggactgacctttcttgcccccaaagataccacacgggttcagggtttttttcagcatttgcaggtcaggtttggtgacgggccgtggcaggatgttaaggggcttgatgaagtgggcagtgatacaggcagaacaggagaatga

SEQ ID NO: 220 - DNA, 1317 bp, Escherichia coli
atggcagcagtacaaatatcaggcgtgctgaaagatggtgcgggaaaaccaatacagaactgcaccattcaactgaaagccagacgtaacagcaccacggtggtggtgaacacggtggcctctgaaaatccggatgaggcagggcgttacagcatggacgtcgagtatggtcagtacagcgtcactctgttggtggagggattcccgccatcacatgccgggaccatctccgtgtatgaagattctcaaccgggtacgctgaatgattttctcggtgccatgacggaggatgatgcccgtccggaggcactgcgtcgttttgaacagatggtggaagaagcagcgcgtcacgcagaggaggcgaagaagaatgccggagaagcagagacgtccgcgaggaatgccggcatatcagccagtaaggcggaagcgagcgccgcaaatgctgatacttcagcagaggatgcatcggagtcagcccggcaggcggcagaaagtgcagcctctgcaaagaagtcagaggaagcgtcctcgtcctcagcctctgaggccgctcaaaaagccagtgagtcattacaaagtgcaacagatgccgagttgtcaaaaaagacggcagaaagtgcagccggtaatgcagccagggatgcaacgaccgcaacagaaaaagcccgggaatcagcagaaagcgcacagtcagcggaacaaagcagaatagcggcggaagacgccgtaaacagaattcccaccgtggtggggcctcccggaccaaagggggaaccgggtcccgcgggtcctcaggggccgaagggagataaaggagagcgtggagacaccggtccggcaggggcaaccggtgaacggggaccgggaggagatacaggtccggcaggtccgcaggggccgaaaggcgacaggggagagcggggagagaccggtctgacaggaagtacaggtccacaggggccaaagggagataccggggcaacaggtccggcaggaccgcagggaccgaaaggggaaacaggtgcggctggcccggtgggggctaccggacctcagggggcgaagggcgacccgggggagacacaaatacggttccgtctggggccgatgagaattattgagacaaacagctatggctggttcccgggtacagatggtgcgctcatcaccggactgacctttcttgaccccaaagatgccacacaggttcaggggatgtttcagcatttgcaggtcagatttggtgacgggccatggcaggatgttaagggactggatgaagtgggcagtgatacaggcagaactggagaatga

SEQ ID NO: 221 - DNA, 1314 bp, Escherichia coli
atggcagtaaagatttcaggtgtactgaaagacggcacaggaaaaccggtagagaactgcaccattcaactgaaagccagacggaccagcagcacggtggtggtgaacacggtggcctctgaaaatccggatgaagccggtcgttacagcatggacgttgagtacggtcagtacagcgtcattctgttggtggaaggattcccgccgtcacatgccgggaccatcaccgtgtatgaagattctcaaccggggacgctgaatgattttcttggtgccatgtcggaggatgacgtccggccggaggcactgcgtcgttttgaactgatggtggaagaagcggcgcgtcacgctgaggaggcgaagaagaatgccggagaggcggagacgtccgcgaggaatgccggcatatcatccagtaaggcggaagcgagcgcggcaaatgctgacacttcagcaggggatgcatcggagtcagcccggcaggcggcagaaagtgcagccgctgcaaagcagtcagaggaggcgtcctcgtcctcggcctctgcggccgctcaaaaagccagtgagtcatcacaaagtgcagcagaagctgaattgtcaagaaagacggcagaaagtgcagccggtaatgcagccagggatgcaacgaccgcaacagaaaaagcccgggagtcagcagaaagcgcacggtcagcggaacaaagcaggatagcggcggaagaagccgtaaaccgaatcccgaccgtggtggggcctcccgggccaaagggggaaccgggtcccgcgggtcctcaggggccgaagggagataaaggagagcgtggcgacaccggcccggcaggggcaaccggtgaaagggggccggcaggtgatgctggtccggcaggcccgcaggggccgaaaggcgacaggggagagcggggagagaccggtctgacgggaaatgcaggtccacagggtccaaagggagataccggtgcggcaggcccggcaggcccacagggaccgaaaggagaaacaggtgcggcaggcccggtgggggcgaccggacctcaggggccgaagggcgacccgggggagacgcaaatacggttccgtctggggccgggaaacattattgagacaaacagccatggctggttcccggatacagatggcgcactcatcaccggactgacctttcttgaccccaaagataccacacgggttcagggtttttttcagcatttgcaggtcaggtttggtgacgggccgtggcaggatgttaagggactggatgaagtgggcagtgatacaggcagaacaggagaatga

SEQ ID NO: 222 - DNA, 1317 bp, Escherichia coli; identical to SEQ ID NO: 185

SEQ ID NO: 223 - DNA, 1218 bp, Escherichia coli
gtggtggtgaacacggtggcctctgaaaatccggatgaagccggtcgttacagcatggacgttgagtacggtcagtacagcgtcattctgttggtggaaggattcccgccgtcacatgccgggaccatcaccgtgtatgaagattctcaaccggggacgctgaatgattttctcggtgccatgtcggaggatgacgtccggccggaggcactgcgtcgttttgaactgatggtggaagaagcggcgcgtcacgctgaggaggcgaagaagaatgccggagaggcggagacgtccgcgaggaatgccggcatatcagccagtcaggcagaagagagcgcggcaaatgctgacacttcagcaggggatgcatcggagtcagcccggcaggcggcagaaagtgcagccgctgcaaagcagtcagaggaggcgtcctcgtcctcggcttctgcggccgctcaaaaagccagtgagtcatcacaaagtgcagcagaagctgaattgtcaagaaagacggcagaaagtgcagccggtaatgcagccagggatgcaacgaccgcaacagaaaaagcccgggagtcagcagaaagcgcacagtcagcggaacaaagcaggatagcggcggaagaagccgtaaaccgaatccccaccgtggtgggacctcccgggccaaagggggaaccgggtcccgcgggtcctcaggggccgaagggagataaaggagagcgtggcgacaccggcccggcaggggcaaccggcgaacggggaccggcaggtgatgctggtccggcaggcccgcaggggccgaaaggtgacaggggagagcggggagagaccggtctgacgggaaatgcaggtccacagggtccaaagggagacaccggggcagcaggcccggcaggcccacagggaccgaaaggagaaacaggtgcggctggcccggtgggggcaaccggacctcagggaccgaagggcgacccgggggagacgcaaatacggttccgtctggggccgggaaacattattgagacaaacagccatggctggttcccggatacagatggcgcactcatcaccggactgacctttcttgaccccaaagataccacacgggttcagggtttttttcagcatttgcaggtcaggtttggtgacgggccgtggcaggatgttaagggactggatgaagtgggcagtgatacaggcagaacaggagaatga

SEQ ID NO: 224 - DNA, 1413 bp, Escherichia coli
atggcagtaaagatttcaggtgtactgaaagacggcacaggaaaaccggtagagaactgcaccattcaactgaaagccagacgtaacagcgccacggtggtggtgaacacggtggcctctgaaaatccggatgaagccggtcgttacagcatggacgttgagtacggtcagtacagcgttattctgttggtggaagggttcccgccgtcacatgccgggaccatcaccgtgtatgaagattctcaaccggggacgctgaatgattttctcggtgccatgtcggaggatgacgtccggccggaggcactgcgccgttttgaactgatggtggaagaagcggcgcgtcacgctgaggaggcgaagaagaatgccggagaggcggagacgtccgcgaggaatgccggcatatcagccagtcaggcagaagagagcgcggcaaatgctgacacttcagcaggggatgcatcggagtcagcccggcaggcggcagaaagtgcagccgctgcaaagcagtcagaggaggcgtcctcgtcctcggcctctgcggccgctcaaaaagccagtgagtcattacaaagtgcaacagatgctgagttgtcaaaaaagacggcagaaagtgcagccggtaatgcagccagggatgcaacgaccgcagcagaaaaagcccgggagtcagcagaaagcgcacagtcagcggaacaaagcaggatagcggcggaagaagccgtaaaccgaatccccaccgtggtggggcctcccgggccaaagggggaaccggggcccgcgggtcctcaggggccgaagggagataaaggagagcgtggagacaccggcccggcaggggcaaccggcgaacggggaccggcaggtgatgctggtccggcaggcccgcaggggccgaaaggtgacaggggagagcgtggagacaccggcccggcaggggcaaccggcgaacggggaccggcaggtgatgctggtccggcaggcccgcaggggccgaaaggtgacaggggagagcggggagagaccggtctgacgggaaatgcaggtccacagggtccaaagggagataccggtgcggcaggcccggcaggcccacagggaccgaaaggagaaacaggtgcggctggcccggtgggggcaaccggacctcaggggccgaagggcgacccgggggagacgcaaatacggttccgtctggggccgggaaacattattgagacaaacagcaatggctggttcccggatacagatggtgcgctcatcaccggactgacctttcttgaccccaaagatgccacacaggttcaggggctgtttcggcatttgcaggtcaggtttggtgacgggccgtggcaggatgttaaggggctggatgaagtgggcagtgatacaggcagaacaggagaatga

SEQ ID NO: 225 - DNA, 1314 bp, Escherichia coli; identical to SEQ ID NO: 219

SEQ ID NO: 226 - DNA, 1314 bp, Escherichia coli
atggcagtaaagatttcaggtgtactgaaagacggcacaggaaaaccggtagagaactgcaccattcaactgaaagccagacgtaacagcgccacggtggtggtgaacacggtggcctctgaaaatccggatgaagccggtcgttacagcatggacgttgagtacggtcagtacagcgttattctgttggtggaagggttcccgccgtcacatgccgggaccatcaccgtgtatgaagattctcaaccggggacgctgaatgattttctcggtgccatgtcggaggatgacgtccggccggaggcactgcgccgttttgaactgatggtggaagaagcggcgcgtcacgctgaggaggcgaagaagaatgccggagaggcggagacgtccgcgaggaatgccggcatatcagccagtcaggcagaagagagcgcggcaaatgctgacacttcagcaggggatgcatcggagtcagcccggcaggcggcagaaagtgcagccgctgcaaagcagtcagaggaggcgtcctcgtcctcggcctctgcggccgctcaaaaagccagtgagtcattacaaagtgcaacagatgctgagttgtcaaaaaagacggcagaaagtgcagccggtaatgcagccagggatgcaacgaccgcagcagaaaaagcccgggagtcagcagaaagcgcacagtcagcggaacaaagcaggatagcggcggaagaagccgtaaaccgaatccccaccgtggtggggcctcccgggccaaagggggaaccggggcccgcgggtcctcaggggccgaagggagataaaggagagcgtggagacaccggcccggcaggggcaaccggcgaacggggaccggcaggtgatgctggtccggcaggcccgcaggggccgaaaggtgacaggggagagcggggagagaccggtctgacgggaaatgcaggtccacagggtccaaagggagataccggtgcggcaggcccggcaggcccacagggaccgaaaggagaaacaggtgcggctggcccggtgggggcaaccggacctcaggggccgaagggcgacccgggggagacgcaaatacggttccgtctggggccgggaaacattattgagacaaacagcaatggctggttcccggatacagatggtgcgctcatcaccggactgacctttcttgaccccaaagatgccacacaggttcaggggctgtttcggcatttgcaggtcaggtttggtgacgggccgtggcaggatgttaaggggctgaatgaagtgggcagtgatacaggcagaacaggagaatga

SEQ ID NO: 227 - DNA, 1314 bp, Escherichia coli
atggcagtaaagatttcaggtgtactgaaagacggcacaggaaaaccggtagagaactgcaccattcaactgaaagccagacgtaacagcgccacggtggtggtgaacacggtggcctctgaaaatccggatgaagccggtcgttacagcatggacgttgagtacggtcagtacagcgttattctgttggtggaagggttcccgccgtcacatgccgggaccatcaccgtgtatgaagattctcaaccggggacgctgaatgattttctcggtgccatgtcggaggatgacgtccggccggaggcactgcgccgttttgaactgatggtggaagaagcggcgcgtcacgctgaggaggcgaagaagaatgccggagaggcggagacgtccgcgaggaatgccggcatatcagccagtcaggcagaagagagcgcggcaaatgctgacacttcagcaggggatgcatcggagtcagcccggcaggcggcagaaagtgcagccgctgcaaagcagtcagaggaggcgtcctcgtcctcggcctctgcggccgctcaaaaagccagtgagtcattacaaagtgcaacagatgctgagttgtcaaaaaagacggcagaaagtgcagccggtaatgcagccagggatgcaacgaccgcaacagaaaaagcccgggagtcagcagaaagcgcacagtcagcggaacaaagcaggatagcggcggaagaagccgtaaaccgaatccccaccgtggtggggcctcccgggccaaagggggaaccggggcccgcgggtcctcaggggccgaagggagataaaggagagcgtggagacaccggcccggcaggggcaaccggcgaacggggaccggcaggtgatgctggtccggcaggcccgcaggggccgaaaggtgacaggggagagcggggagagaccggtctgacgggaaatgcaggtccacagggtccaaagggagataccggtgcggcaggcccggcaggcccacagggaccgaaaggagaaacaggtgcggctggcccggtgggggcaaccggacctcagggaccgaagggcgacccgggggagacacaaatccgttttcgtctggggccgggaaacattattgagacaaacagcaatggctggttcccggatacagatggcgcactcatcaccggactgacctttcttgcccccaaagatgccacacgggttcaggttttttttcagcatttgcaggtcaggtttggtgacgggccgtggcaggatgttaaggggctggatgaagtgggcagtgatacaggcagaacaggagaatga

SEQ ID NO: 228 - DNA, 1224 bp, Escherichia coli
atggcagtaaagatttcaggtgtactgaaagacggcacaggaaaaccggtagagaactgcaccattcaactgaaagccagacgtaacagcgccacggtggtggtgaacacggtggcctctgaaaatccggatgaagccggtcgttacagcatggacgttgagtacggtcagtacagcgttattctgttggtggaagggttcccgccgtcacatgccgggaccatcaccgtgtatgaagattctcaaccggggacgctgaatgattttctcggtgccatgtcggaggatgacgtccggccggaggcactgcgtcgttttgaactgatggtggaagaagcggcgcgtcacgctgaggaggcgaagaagaatgccggagaggcggagacgtccgcgaggaatgccggcatatcagccagtcaggcagaagagagcgcggcaaatgctgacacttcagcaggggatgcatcggagtcagcccggcaggcggcagaaagtgcagccgctgcaaagcagtcagaggaggcgtcctcgtcctcggcctctgcggccgctcaaaaagccagtgagtcattacaaagtgcagcagatgctgagttgtcaaaaaagacggcagaaagtgcagccggtaatgcagccagggatgcaacgaccgcaacagaaaaagcccgggagtcagcagaaagcgcacagtcagcggaacaaagcaggatagcggcggaagaggccgtaaaccgaatccccacggtggtggggcctcccgggccaaagggggaaccgggtcccgcgggtcctcaggggccgaagggagataaaggagagcgtggagacaccggtccggcaggggcaaccggtgaaagggggccggcaggtgatgctggtccggcaggcccggcaggcccggcaggcccacagggaccgaaaggagaaacaggtgcggctggcccggtgggggcaaccggacctcaggggccgaagggcgacccgggggagacgcaaatacggttccgtctggggccgggaaacattattgagacaaacagccatggctggttcccggatacagatggcgcactcatcaccggactgacctttcttgaccccaaagatgccacacgggttcagggtttttttcagcatttgcaggtcaggtttggtgacgggccgtggcaggatgttaaggggctggatgaagtgggcagtgatacaggcagaacaggagaatga

SEQ ID NO: 229 - DNA, 1218 bp, Escherichia coli
gtggtggtgaacacggtggcctctgaaaatccggatgaagccggtcgttacagcatggacgttgagtacggtcagtacagcgtcattctgttggtggagggcttcccgccgtcacatgccgggaccatcaccgtgtatgaagattctcaacccggtacgctgaatgattttctcggcgccatgtcggaggatgacgtccggccggaggcactgcgtcgttttgaactgatggtggaagaagcggcgcgtcacgctgaggaggcgaagaagaatgccggagaggcggagacgtccgcgaggaatgccggcatatcagccagtcaggcagaagagagcgctgcaaatgctgacacttcagcaggggaggcatcggagtcagcccggcaggcggcagaaagtgcagcctcagcaaagcagtcagaggaagcgtcctcgtcctcggcttctgcggccgctcaaaaagccagtgagtcatcacaaagtgcagcagaagctgaattgtcaagaaagacggcagaaagtgcagccggtaatgcagccagggatgcaacgaccgcaacagaaaaagcccgggagtcagcagaaagcgcacagtcagcggaacaaagcaggatagcggcggaagaggccgtaaaccgaatccccaccgtggtgggacctcccgggccaaagggggaacaggggcccgcgggtcctcaggggccgaagggtgataagggagagcgtggtgacaccggccctgtcggggcaaccggcgaacggggaccggcaggtgatgctggtccggcaggaccacagggaccgaaaggcgacaggggagagcggggagagaccggtctgacgggaaatgcaggtccacagggtccaaagggagataccggtgcggcaggcccggctggcccacagggaccgaaaggagaaacaggtgcggctggcccggtgggggcaaccggacctcaggggccgaagggcgacccgggggagacgcaaatacggttccgtctggggccgggaaacattattgaaacaaacagccatggctggttcccggatacagatggcgcactcatcaccggactgacctttcttgaccccaaagatgccacacgggttcagggtttttttcagcatttgcaggtcaggtttggtgacgggccatggcaggatgttaagggactggatgaagtgggcagtgatacaggcagaacaggagaatga

SEQ ID NO: 230 - DNA, 1164 bp, Escherichia coli
atggacgttgagtacggtcagtacagcgtcattctgttggtggaaggcttcccgccgtcacatgccgggaccatcaccgtgtatgaagattctcaaccggggacgctgaatgattttctcggtgccatgtcggaggatgacgtccggccggaggcactgcgccgttttgaactgatggtggaagaggtggcgcgtcacgctgaggaggcgaagaagaatgccggagaggcggagacgtcagcgaggaatgccggcatatcagccagtcaggcagaagagagcgctgcaaatgctgacacttcagcaggggatgcatcggagtcagcccggcaggcggcagaaagtgcagccgctgcaaagcagtcagaggaggcgtcctcgtcctcggcctctgcggccgctcaaaaagccagtgagtcattacaaagtgcaacagatgctgagttgtcaaaaaagacggcagaaagtgcagccggtaatgcagccagggatgcaacgaccgcagcagaaaaagcccgggagtcagcagaaagcgcacagtcagcggaacaaagcaggatagcggcggaagaagccgtaaacagaatccccaccgtggtggggcctcccgggccaaagggggaaccgggtcccgcgggtcctcaggggccgaagggagataaaggagagcgtggcgacaccggcccggcaggggcaaccggtgaaagggggccggcaggtgatgctggtccggcaggcccgcaggggccgaaaggcgacaggggagagcggggagagaccggtctgacgggaaatgcaggtccacaggggccaaagggagataccggtgcggcaggtccggcaggcccacagggaccgaaaggagaaacaggtgcggctggcccggtgggggcaaccggacctcaggggccgaagggcgacccgggggagacgcaaatacggttccgtctggggccgggaaacattattgagacaaacagcaatggctggttcccggatacagatggtgcgctcatcaccggactgacctttcttgaccccaaagatgccacacgggttcagggtttttttcagcatttgcaggtcaggtttggtgacgggccatggcaggatgttaagggactggatgaagtgggcagtgatacaggcagaacaggagaatga

SEQ ID NO: 231 - DNA, 1218 bp, Escherichia coli
gtggtggtgaacacggtggcctctgaaaatccggatgaagccggtcgttacagcatggacgttgagtacggtcagtacagcgtcattctgttggtggaaggattcccgccgtcacatgccgggaccatcaccgtgtatgaagattctcaaccggggacgctgaatgattttctcggtgccatgtcggaggatgacgtccgtccggaggcactgcgtcgttttgaactgatggtggaagaggtggcgcgtcacgcagaggaggcgaagaagaatgccggagaagcagagacgtccgcgaggaatgccggcatatcagtcagtcaggcggaagcgagcgcggcaaatgctgacacttcagcaggggaggcatcggagtcagcccggcaggcggcagaaagtgcagcctcagcaaagaagtcagaggatgcgtcctcgtcctcggcttctgcggccgctcaaaaagccagtgagtcatcacaaagtgcagcagaagctgaattgtcaagaaagacggcagaaagtgcagccggtaatgcagccagggatgcaacgaccgcaacagaaaaagcccgggagtcagcagaaagcgcacagtcagcggaacaaagcaggatagcggcggaagaggccgtaaaccgaatccccaccgtggtgggacctcccgggccaaagggggaacaggggcccgcgggtcctcaggggccgaagggtgataagggagagcgcggtgacaccggccctgtcggggcaaccggcgaacggggaccggcaggtgatgctggtccggcaggcccgcaggggccgaaaggtgacatgggagagcggggagagaccggtctgacgggagatgcaggtccacagggtccaaagggagataccggtacggcaggcccggcaggcccacagggaccgaaaggagaaacaggtgcggctggcccggtgggggcaaccggacctcaggggccgaagggcgacccgggggagacgcaaatacggttccgtctggggccgggaaacattattgagacaaacagcaatggctggttcccggatacagatggcgcgctcatcaccggactgacctttcttgaccccaaagatgccacacgggttcagggactgtttcagcatttgcaggtcagatttggcgacgggccgtggcaggatgtcaaggggctggatgaagtgggcagtgatacaggcagaacaggagaatga

SEQ ID NO: 232 - DNA, 1203 bp, Escherichia coli
gtggcctctgaaaatccggatgaagccggtcgttacagcatggacgttgagtacggtcagtacagcgtcattctgttggtggagggactcccgccgtcacatgccgggaccatcaccgtgtatgaagattctcaaccggggacgctgaatgattttctcggtgccatgtcggaggatgacgtccgtccggaggcactgcgtcgttttgaactgatggtggaagaagcagcgcgtcacgcagaggaggcgaagaagaatgccggagaagcagagacgtccgcgaggaatgccggcatatcagccagtcaggcagaagagaacgctgcaaatgctgacacttcagcaggggatgcatcggagtcagcccggcaggcggcagaaagtgcagccgctgcaaagcagtcagaggaggcgtcctcgtcctcggcctctgcggccgctcaaaaagccagtgagtcatcacaaagtgcagcagaagctgaattgtcaagaaagacggcagaaagtgcagccggtaatgcagtcagggatgcaacgaccgcaacagaaaaagcccgggagtcagcagaaagcgcacagtcagcggaacaaagcaggatagcggcggaagaagccgtaaaccgaatcccgaccgtggtggggcctcccgggccaaagggggaacaggggcccgcgggtcctcaggggccgaagggagataaaggagagcgtggcgacaccggcccggcaggggcaaccggtgaacgggggccggcaggtgatgctggtccggcaggcccgcaggggccgaaaggcgacaggggagagcggggagagaccggtctgacgggaaatgcaggtccacagggtccaaagggagataccggtgcggcaggcccggcaggcccacagggaccgaaaggagaaacaggtgcggctggcccggtgggggcaaccggacctcaggggccgaagggcgacccgggggagacgcaaatacggttccgtctggggccgggaaacattattgagacaaacagccatggctggttcccggatacagatggcgcactcatcaccggactgacctttcttgaccccaaagatgccacacgggttcagggtttttttcagcatttgcaggtcaggtttggtgacgggccgtggcaggatgttaaggggctggatgaagtgggcagtgatacaggcagaacaggagaatga

SEQ ID NO: 233 - DNA, 1314 bp, Escherichia coli
atgacagtaaaaatttctggcgtgcttaaagatggcacaggaaaaccagtacagaactgcaccattgtgctgaaggccagacgaaccagcagcacggtggtggtgaacacggtggcctctgaaaatccggatgaagccggacgttacagcatggatgttgagcatggtcagtacagcgtcaccctgctggttgaaggttttccgccttcacatgccgggaccatcaccgtgtatgaagattcccgacccggtacgctgaatgattttctcggtgccatgacggaggatgatgcccgtcctgaggcactgcgccgttttgaactgatggtggaagaggtggtgcgtaacgcagaggaggcgaagaagaatgccggagaggcggagacgtcagcgaggaatgccggcatatcagccagtcaggcagaagagagcgctgcaaatgctgacacttcagcaggggaggcatcggagtcagcccggcaggcggcagaaagtgcagcctcagcaaagcagtcagaggatgcgtcctcgtcctcggcttctgcggccgctcaaaaagccagtgagtcatcacaaagtgcagcagatgctgaattgtcaagaaagacggcagaaagtgcagccggtaatgcagccagggatgcaacgaccgcagcagaaaaagcccgggagtcagcagaaagcgcacagtcagcggaacaaagcaggatagcggcggaagacgccgtaaaccgaatccccaccgtggtgggacctcccgggccaaagggggaacaggggcccgctggccctcaggggccgaagggggataagggagagcgtggtgacaccggccctgtcggggcaaccggcgaacggggaccggcaggtgatgctggtccggcaggaccacagggaccgaaaggcgacaggggagagcggggagagaccggtctgacgggaaatgcaggtccacagggtccaaagggagataccggtgcggcaggcccggctggcccacagggaccgaaaggagaaacaggtgcggctggcccggtgggggcaaccggacctcaggggccgaagggcgacccgggggagacgcaaatacggttccgtctggggccgggaaacattattgagacaaacagccatggctggttcccggatacagatggcgcactcatcaccggactgacctttcttgaccccaaagataccacacgggttcagggtttttttcggcatttgcaggtcaggtttggtgacgggccgtggcaggatgttaaggggctggatgaagtgggcagtgatacaggcagaacaggagaatga

SEQ ID NO: 234 - DNA, 1314 bp, Escherichia coli
atggcagtaaagatttcaggtgtactgaaagacggcacaggaaaaccggtacagaactgcacaatccagctgaaagcaaaacgtaacagctccacggtggtggtgaacaccctggcctcagaaaatccggatgaagccgggcgttacagcatggacgttgagtacggtcagtacagcgttattctgttggtggaaggattcccgccgtcacatgccgggaccatcaccgtgtatgaagattctcaaccggggacgctgaatgattttctcggtgccatgtcggaggatgacgtccggccggaggcactgcgtcgttttgaactgatggtggaagaagcggcgcgtcacgctgaggaggcgaagaagaatgccggagaggcggagacgtccgcgaggaatgctggcatatcagccagtcaggcagaagagagcgctgcaaatgctgacacttcagcaggggatgcatcggagtcagcccggcaggcggcagaaagtgcagcctcagcaaagcagtcagaggatgcgtcctcgtcctcggcctctgcggccgctcaaaaagccagtgagtcattacaaagtgcaacagatgctgagttgtcaaaaaagatggcagaaagtgcagccggtaatgcagccagggatgcaacgaccgcaacagaaaaagcccgggagtcagcagaaagcgcacagtcagcggaacaaagcaggatagcggcggaagaggccgtaaaccgaatccccaccgtggtgggacctcccgggccaaagggggaacaggggcccgcgggtcctcaggggccgaagggtgataagggagagcgcggtgacaccggccctgtcggggcaaccggcgaacggggaccggcaggtgatgctggtccggcaggcccgcaggggccgaaaggtgacaggggagagcggggagagaccggtctgacgggaaatgcaggtccacagggtccaaagggagataccggtgcggcaggcccggcaggcccacagggaccgaaaggagaaacaggtgcggctggcccggtgggggcaaccggacctcagggaccgaagggcgacccgggggagacacaaatccgttttcgtctggggccggcgagcattattgagacaaacagcaatggctggttcccggatacagatggcgcactcatcaccggactgacctttcttgaccccaaagatgccacacaggttcaggggctgtttcagcatttgcaggtcaggtttggtgacgggccgtggcaggatgttaaggggctgaatgaagtgggcagtgatacaggcagaacaggagaatga

SEQ ID NO: 235 - DNA, 1314 bp, Escherichia coli
atggcagtaaagatttcaggtgtgctgaaagacggcacaggaaaaccaatacagaactgcaccattcaactgaaagccagacgtaacagcaccacggtggtggtgaacacggtggcctctgaaaatccggatgaggcagggcgttacagcatggacgtcgagtatggtcagtacagcgtcactctgttggtggagggattccctccatcacatgccgggaccatcaccgtgtatgaagattctcaaccggggacgctgaatgattttctcggtgccatgtcggaggatgacgtccggccggaggcaatgcgtcgttttgaactgatggtggaagaagcggcgcgtcacgcagaggaggcgaagaagaatgccggagaggcggagacatcagcgaggaatgccggcatatcagccagtcaggcagaagagagcgctgcaaatgctgacacttcagcaggggatgcatcggagtcagcccggcaggcggcagaaagtgcagccgctgcaaagcagtcagaggaggcgtcctcgtcctcggcctctgcggccgctcaaaaagccagtgagtcatcacaaagtgcagcagatgctgaattgtcaagaaagacggcagaaagtgcagccggtaatgcagccagggatgcaacgaccgcaacagaaaaagcccgggagtcagcagaaagcgcacagtcagcggaacaaagcaggatagcggcggaagaggccgtaaaccgaatccccaccgtggtgggacctcccgggccaaagggggaacaggggcccgcgggtcctcaggggccgaagggtgataagggagagcgcggtgacaccggccctgtcggggcaaccggcgaacggggaccggcaggtgatgctggtccggcaggcccgcaggggccgaaaggtgacaggggagagcggggagagaccggtctgacgggaaatgcaggtccacagggtccaaagggagataccggtgcggcaggcccggcaggcccacagggaccgaaaggagaaacaggtgcggctggcccggtgggggcaaccggacctcagggaccgaagggcgacccgggggagacacaaatccgttttcgtctggggccggcgagcattattgagacaaacagcaatggctggttcccgggtacagatggtgcgctcatcaccggactgacctttcttgaccccaaagatgccacacaggttcaggggctgtttcagcatttgcaggtcaggtttggtgacgggccgtggcaggatgttaaggggctggatgaagtgggcagtgatacaggcagaacaggagaatga

SEQ ID NO: 236 - DNA, 1320 bp, Escherichia coli
gtgaatatggcagtaaagatttcaggtgtgctgaaagacggcacaggaaaaccaatacagaactgcaccattcaactgaaagccagacgtaacagcaccacggtggtggtgaacacggtggcctctgaaaatccggatgaggcagggcgttacagcatggacgtcgagtatggtcagtacagcgtcactctgttggtggagggattccctccatcacatgccgggaccatcaccgtgtatgaagattctcaaccggggacgctgaatgattttctcggtgccatgtcggaggatgacgtccggccggaggcaatgcgtcgttttgaactgatggtggaagaagcggcgcgtcacgcagaggaggcgaagaagaatgccggagaggcggagacatcagcgaggaatgccggcatatcagccagtcaggcagaagagagcgctgcaaatgctgacacttcagcaggggatgcatcggagtcagcccggcaggcggcagaaagtgcagccgctgcaaagcagtcagaggaggcgtcctcgtcctcggcctctgcggccgctcaaaaagccagtgagtcatcacaaagtgcagcagatgctgaattgtcaagaaagacggcagaaagtgcagccggtaatgcagccagggatgcaacgaccgcaacagaaaaagcccgggagtcagcagaaagcgcacagtcagcggaacaaagcaggatagcggcggaagaggccgtaaaccgaatccccaccgtggtgggacctcccgggccaaagggggaacaggggcccgcgggtcctcaggggccgaagggtgataagggagagcgcggtgacaccggccctgtcggggcaaccggcgaacggggaccggcaggtgatgctggtccggcaggcccgcaggggccgaaaggtgacaggggagagcggggagagaccggtctgacgggaaatgcaggtccacagggtccaaagggagataccggtgcggcaggcccggcaggcccacagggaccgaaaggagaaacaggtgcggctggcccggtgggggcaaccggacctcagggaccgaagggcgacccgggggagacacaaatccgttttcgtctggggccggcgagcattattgagacaaacagcaatggctggttcccgggtacagatggtgcgctcatcaccggactgacctttcttgaccccaaagatgccacacaggttcaggggctgtttcagcatttgcaggtcaggtttggtgacgggccgtggcaggatgttaaggggctggatgaagtgggcagtgatacaggcagaacaggagaatga

SEQ ID NO: 237 - DNA, 1314 bp, Escherichia coli
atggcagtaaagatttcaggtgtactgaaagacggcacaggaaaaccggtacaaaactgcaccattcagctaaaggccagacgcaacagcaccacggtggtggtgaacacggtggcctcagaaaatccggatgaagccgggcgttacagcatggacgttgagtacggacagtacagcgtcagtctgttggtggagggatttccgccgtcacacgccgggattatcaccgtgtatgaggactcaaagccgggcacactgaatgatttcctcggtgcaatgacggaggatgatgtccggccggaggcactgcgccgttttgaactgatggtggaagaggtggcgcgtcacgctgaggaggcgaagaagaatgccggagaggcggagacgtcagcgaggaatgccggcatatcagccagtcaggcagaagagagcgctgcaaatgctgacacttcagcaggggatgcatcggagtcagcccggcaggcggcagaaagtgcagcctcagcaaagcagtcagaggatgcgtcctcgtcctcggcttctgcggccgctcaaaaagccagtgagtcatcacaaagtgcagcagaagctgaattgtcaagaaagacggcagaaagtgcagccggtaatgcagccagggatgcaacgaccgcaacagaaaaagcccgggagtcagcagaaagcgcacagtcagcggaacaaagcaggatagcggcggaagaggccgtaaaccgaatccccaccgtggtgggacctcccgggccaaagggggaacaggggcccgcgggtcctcaggggccgaagggtgataagggagagcgcggtgacaccggccctgtcggggcaaccggcgaacggggaccggcaggtgatgctggtccggcaggcccgcaggggccgaaaggtgacaggggagagcggggagagaccggtctgacgggaaatgcaggtccacagggtccaaagggagataccggtgcggcaggcccggcaggcccacagggaccgaaaggagaaacaggtgcggctggcccggtgggggcaaccggacctcagggaccgaagggcgacccgggggagacacaaatccgttttcgtctggggccggcgagcattattgagacaaacagcaatggctggttcccggatacagatggcgcactcatcaccggactgacctttcttgaccccaaagatgccacacaggttcaggggctgtttcggcatttgcaggtcaggtttggtgacgggccgtggcaggatgttaaggggctggatgaagtgggcagtgatacaggcagaacaggagaatga

SEQ ID NO: 238 - DNA, 1317 bp, Escherichia coli; identical to SEQ ID NO: 185

SEQ ID NO: 239 - DNA, 1320 bp, Escherichia coli; identical to SEQ ID NO: 195

SEQ ID NO: 240 - DNA, 1314 bp, Escherichia coli
atggcagtaaagatttcaggtgtactgaaagacggcacaggaaaaccggtagagaactgcaccattcaactgaaagccagacggaccagcagcacggtggtggtgaacacggtggcctctgaaaatccggatgaagccggtcgttacagcatggacgttgagtacggtcagtacagcgtcattctgttggtggagggcttcccgccgtcacatgccgggaccatcaccgtgtatgaagattctcaaccggggacgctgaatgattttctcggtgccatgtcggaggatgacgtccggccggaggcactgcgtcgttttgaactgatggtggaagaagcggcgcgtcacgctgaggaggcgaagaagaatgccggagaggcggagacgtccgcgaggaatgccggcatatcagccagtcaggcagaagagagcgcggcaaatgctgacacttcagcaggggatgcatcggagtcagcccggcaggcggcagaaagtgcagccgctgcaaagcagtcagaggaggcgtcctcgtcctcggcctctgcggccgctcaaaaagccagtgagtcattacaaagtgcaacagatgctgagttgtcaaaaaagacggcagaaagtgcagccggtaatgcagccagggatgcaacgaccgcagcagaaaaagcccgggagtcagcagaaagcgcacagtcagcggaacaaagcaggatagcggcggaagaagccgtaaaccgaatccccaccgtggtggggcctcccgggccaaagggggaaccggggcccgcgggtcctcaggggccgaagggagataaaggagagcgtggagacaccggcccggcaggggcaaccggcgaacggggaccggcaggtgatgctggtccggcaggcccgcaggggccgaaaggtgacaggggagagcggggagagaccggtctgacgggaaatgcaggtccacagggtccaaagggagataccggtgcggcaggcccggcaggcccacagggaccgaaaggagaaacaggtgcggctggcccggtgggggcaaccggacctcaggggccgaagggcgacccgggggagacgcaaatacggttccgtctggggccgggaaacattattgagacaaacagcaatggctggttcccggatacagatggtgcgctcatcaccggactgacctttcttgaccccaaagataccacacaggttcaggggctgtttcggcatttgcaggtcaggtttggtgacgggccgtggcaggatgttaaggggctgaatgaagtgggcagtgatacaggcagaacaggagaatga

SEQ ID NO: 241 - DNA, 1356 bp, Escherichia coli; identical to SEQ ID NO: 192

SEQ ID NO: 242 - DNA, 1314 bp, Escherichia coli; identical to SEQ ID NO: 177

SEQ ID NO: 243 - DNA, 1305 bp, Escherichia coli; identical to SEQ ID NO: 182

SEQ ID NO: 244 - DNA, 1314 bp, Escherichia coli; identical to SEQ ID NO: 173

SEQ ID NO: 245 - DNA, 1224 bp, Escherichia coli; identical to SEQ ID NO: 174

SEQ ID NO: 246 - DNA, 1170 bp, Escherichia coli
atggcagtaaagatttcaggtgtactgaaagacggcacaggaaaaccggtagagaactgcaccattcaactgaaagccagacgtaacagcgccacggtggtggtgaacacggtggcctctgaaaatccggatgaagccggtcgttacagcatggacgttgagtacggtcagtacagcgtcattctgttggtggagggcttcccgccgtcacatgccgggaccatcaccgtgtatgaagattctcaacccggtacgctgaatgattttctcggtgccatgtcggaggatgacgtccggccggaggcactgcgccgttttgaactgatggtggaagaggtggcgcgtcacgctgaggaggcgaagaagaatgccggagaggcggagacgtccgcgaggaatgccggcatatcagccagtcaggcagaagagagcgctgcaaatgctgacacttcagcaggggaggcatcggagtcagcccggcaggcggcagaaagtgcagcctcagcaaagcagtcagaggaggcgtcctcgtcctcggcttctgcggccgctcaaaaagccagtgagtcatcacaaagtgcagcagaagctgaattgtcaagaaagacggcagaaagtgcagccggtaatgcagccagggatgcaacgaccgcaacagaaaaagcccgggagtcagcagaaagcgcacagtcagcggaacaaagcaggatagcggcggaagaagccgtaaacagaatccccaccgtggtgggacctcccgggccaaagggggaacaggggcccgcgggtcctcaggggccgaagggagataaaggagagcgtggagacaccggccctgtcggggcaaccggtgaacggggaccgaaaggagaaacaggtgcggctggcccggtgggggcaaccggacctcagggaccgaagggcgacccgggggagacacaaatacggttccgtctggggccgggaaacattattgagacaaacagcaatggctggttcccggatacagatggcgcactcatcaccggactgacctttcttgaccccaaagatgccacacgggttcagggtttttttcagcatttgcaggtcaggtttggtgacgggccgtggcaggatgttaaggggctggatgaagtgggcagtgatacaggcagaacaggagaatga

SEQ ID NO: 247 - DNA, 1314 bp, Escherichia coli
atggcagtaaagatttcaggtgtactgaaagacggcacaggaaaaccggtagagaactgcaccattcaactgaaagccagacggaccagcagcacggtggtggtgaacacggtggcctctgaaaatccggatgaagccggtcgttacagcatggacgttgagtacggtcagtacagcgtcattctgttggtggagggcttcccgccgtcacatgccgggaccatcaccgtgtatgaagattctcaacccggtacgctgaatgattttctcggtgccatgtcggaggatgacgtccggccggaggcactgcgccgttttgaactgatggtggaagaggtggcgcgtcacgctgaggaggcgaagaagaatgccggagaggcggagacgtcagcgaggaatgccggcatatcagccagtcaggcagaagagagcgctgcaaatgctgacacttcagcaggggatgcatcggagtcagcccggcaggcggcagaaagtgcagccgctgcaaagcagtcagaggaggcgtcctcgtcctcggcctctgcggccgctcaaaaagccagtgagtcattacaaagtgcaacagatgctgagttgtcaaaaaagacggcagaaagtgcagccggtaatgcagccagggatgcaacgaccgcagcagaaaaagcccgggagtcagcagaaagcgcacagtcagcggaacaaagcaggatagcggcggaagaagccgtaaaccgaatccccaccgtggtggggcctcccgggccaaagggggaaccggggcccgcgggtcctcaggggccgaagggagataaaggagagcgtggagacaccggccctgtcggggcaaccggtgaacggggaccgagaggagatacaggtccggcaggtccgcaggggccgaaaggtgacaggggagagcggggagagaccggtctgacgggaaatgcaggtccacagggtccaaagggagataccggtgcggcaggcccggcaggcccacagggaccgaaaggagaaacaggtgcggctggcccggtgggggcaaccggacctcagggaccgaagggcgacccgggggagacacaaatacggttccgtctggggccgggaaacattattgagacaaacagcaatggctggttcccggatacagatggtgcgctcatcaccggactgacctttcttgaccccaaagatgccacacaggttcaggggctgtttcggcatttgcaggtcaggtttggtgacgggccgtggcaggatgttaaggggctgaatgaagtgggcagtgatacaggcagaacaggagaatga

SEQ ID NO: 248 - DNA, 1314 bp, Escherichia coli
atggcagtaaagatttcaggtgtactgaaagacggcacaggaaaaccggtagagaactgcaccattcaactgaaagccagacgtaacagcgccacggtggtggtgaacacggtggcctctgaaaatccggatgaagccggtcgttacagcatggacgttgagtacggtcagtacagcgtcattctgttggtggagggcttcccgtcgtcacatgccgggaccatcaccgtgtatgaagattctcaacccggtacgctgaatgattttctcggtgccatgtcggaggatgacgtccggccggaggcactgcgtcgttttgaactgatggtggaagaagcggcgcgtcacgctgaggaggcgaagaagaatgccggagaggcggagacgtccgcgaggaatgccggcatatcagccagtcaggcagaagagagcgctgcaaatgctgacacttcagcaggggaggcatcggagtcagcccggcaggcggcagaaagtgcagcctcagcaaagcagtcagaggatgcgtcctcgtcctcggcttctgcggccgctcaaaaagccagtgagtcatcacaaagtgcagcagaagctgaattgtcaagaaagacggcagaaagtgcagccggtaatgcagccagggatgcaacgaccgcaacagaaaaagcccgggagtcagcagaaagcgcacagtcagcggaacaaagcaggatagcggcggaagaggccgtaaaccgaatccccaccgtggtgggacctcccgggccaaagggggaacaggggcccgcgggtcctcaggggccgaagggtgataagggagagcgcggtgacaccggccctgtcggggcaaccggcgaacggggaccggcaggtgatgctggtccggcaggcccgcaggggccgaaaggtgacaggggagagcggggagagaccggtctgacgggaaatgcaggtccacagggtccaaagggagataccggtgcggcaggcccggcaggcccacagggaccgaaaggagaaacaggtgcggctggcccggtgggggcaaccggacctcagggaccgaagggcgacccgggggagacacaaatccgttttcgtctggggccggcgagcattattgagacaaacagcaatggctggttcccggatacagatggcgcactcatcaccggactgacctttcttgaccccaaagatgccacacaggttcaggggctgtttcggcatttgcaggtcaggtttggtgacgggccgtggcaggatgttaaggggctggatgaagtgggcagtgatacaggcagaacaggagaatga

SEQ ID NO: 249 - DNA, 1317 bp, Escherichia coli; identical to SEQ ID NO: 217

SEQ ID NO: 250 - DNA, 1224 bp, Escherichia coli; identical to SEQ ID NO: 174

SEQ ID NO: 251 - DNA, 1314 bp, Escherichia coli; identical to SEQ ID NO: 219

SEQ ID NO: 252 - DNA, 1314 bp, Escherichia coli
atggcagtaaagatttcaggtgtactgaaagacggcacaggaaaaccggtacagaactgcacaatccagctgaaagcaaaacgtaacagtaccacggtggtggtgaacacggtggcctcagaaaatccggatgaagccgggcgttacagcatggatgttgagtatggccagtacagcgtcaccctgctggttgaaggttttcctccttcgcatgccgggaccatcaccgtgtatgaagattctcagccgggtacgctgaatgattttctcggtgccatgtcggaggatgacgtccgtccggaggcactgcgtcgctttgaacaaatggtggaagaggcagcgcgtcacgccggggaggcgaagaagaatgccggagaggcggagacgtcagcgaggaatgccggcatatcagccagtcaggcagaagagagcgcggcaaatgctgacacttcagcaggggaggcatcggagtcagcccggcaggcggcagaaagtgcagccgctgcaaagaagtcagaggaagcgtcctcgtcctcggcctctgaggccgctcaaaaagccagtgagtcattacaaagtgcagcagatgctgagttgtcaaaaaagacggcagaaagtgcagccggtaatgcagccagggatgcaacgaccgcagcagaaaaagcccgggagtcagcagaaagcgcacagtcagcggaacaaagcaggatagcggcggaagacgccgtaaaccgaatccccaccgtggtgggacctcccgggccaaagggagaaccggggcccgcgggtcctcaggggccgaagggagataaaggagagcgtggcgacaccggtcctgtcggggcaaccggtgagcggggaccggcaggtgatgctggtccggcaggcccgcaggggccgaaaggcgacaggggagagcggggagagaccggtctgacgggaaatgcaggtccacagggtccaaagggagataccggtgcggcaggtccggcaggcccacagggaccgaaaggagaaacaggtgcggctggcccggtgggggcaaccggacctcagggaccgaagggcgacccgggggagacacaaatccgttttcgtctggggccggcgagcattattgagacaaacagcaatggctggttcccgggtacagatggtgcgctcatcaccggactgacctttcttgaccccaaagatgccacacaggttcaggggctgtttcagcatttgcaggtcaggtttggtgacgggccgtggcaggatgttaaggggctggatgaagtgggcagtgatacaggcagaacaggagaatga

SEQ ID NO: 253 - DNA, 1314 bp, Escherichia coli
atggcagtaaagatttcaggtgtactgaaagacggcacaggaaaaccggtacagaactgcacaatccagctgaaagcaaaacgtaacagtaccacggtggtggtgaacacggtggcctcagaaaatccggatgaagccgggcgttacagcatggatgttgagtatggccagtacagcgtcaccctgctggttgaaggttttcctccttcgcatgccgggaccatcaccgtgtatgaagattctcagccgggtacgctgaatgattttctcggtgccatgtcggaggatgacgtccgtccggaggcactgcgtcgctttgaacaaatggtggaagaggcagcgcgtcacgccggggaggcgaagaagaatgccggagaggcggagacgtcagcgaggaatgccggcatatcagccagtcaggcagaagagagcgcggcaaatgctgacacttcagcaggggaggcatcggagtcagcccggcaggcggcagaaagtgcagccgctgcaaagaagtcagaggaagcgtcctcgtcctcggcctctgaggccgctcaaaaagccagtgagtcattacaaagtgcagcagatgctgagttgtcaaaaaagacggcagaaagtgcagccggtaatgcagccagggatgcaacgaccgcagcagaaaaagcccgggagtcagcagaaagcgcacagtcagcggaacaaagcaggatagcggcggaagacgccgtaaaccgaatccccaccgtggtgggacctcccgggccaaagggagaaccggggcccgcgggtcctcaggggccgaagggagataaaggagagcgtggcgacaccggtcctgtcggggcaaccggtgagcggggaccggcaggtgatgctggtccggcaggcccgcaggggccgaaaggcgacaggggagagcggggagagaccggtctgacgggaaatgcaggtccacagggtccaaagggagataccggtgcggcaggtccggcaggcccacagggaccgaaaggagaaacaggtgcggctggcccggtgggggcaaccggacctcagggaccaaagggcgacccgggggagacacaaatccgttttcgtctggggccggcgagcattattgagacaaacagcaatggctggttcccggatacagatggcgcactcatcaccggactgacctttcttgaccccaaagatgccacacaggttcaggggctgtttcagcatttgcaggtcaggtttggtgacgggccatggcaggatgttaagggactggatgaagtgggcagtgatacaggcagtagtggagaatga

SEQ ID NO: 254 - DNA, 1278 bp, Escherichia coli
atgacagtaaaaatttctggcgtgcttaaagatggcacaggaaaaccagtacagaactgcaccattgtgctgaaggccagacgaaccagcagcacggtggtggtgaacacggtggcctctgaaaatccggatgaagccggacgttacagcatggatgttgagcatggtcagtacagcgtcaccctgctggttgaaggttttccgccttcacatgccgggaccattaccgtctatgaaggttccagaccaggtacgctgaatgattttctcggtgccatgacagaggatgatgtccgaccggaggcactgcgtcgttttgaactgatggtggaagaagcggcgcgtcacgctgaggaggcgaagaagaatgccggagaggcggagacgtccgcgaggaatgccggcatatcagccagtcaggcagaagagagcgctgcaaatgctgacacttcagcaggggatgcatcggagtcagcccggcaggcggcagaaagtgcagccgctgcaaagcagtcagaggaggcgtcctcgtcctcggcctctgcggctgctcaaaaagccagtgagtcatcacaaagtgcagcagatgctgagttgtcaaaaaagacggcagaaagtgcagccggtaatgcagccagggatgcaacgaccgcaacagaaaaagcccgggagtcagcagaaagcgcacagtcagcggaacaaagcaggatagcggcggaagaagccgtaaaccgaatcccgaccgtggtggggcctcccgggccaaagggggaaccggggcccgcggatcctcaggggccgaagggagataaaggagagcgtggcgacaccggcccggcaggggcaaccggtgaaagggggccgaaaggtgacaggggagagcggggagagaccggtctgacgggaaatgcaggtccacagggtccaaagggagataccggtgcggcaggcccggcaggcccacagggaccgaaaggagaaacaggtgcggctggcccggtgggggcaaccggacctcagggaccgaagggcgacccgggggagacacaaatacggttccgtctggggccgggaaacattattgagacaaacagcaatggctggttcccggatacagatggcgcactcatcaccggactgacctttcttgaccccaaagatgccacacgggttcaggggttttttcagcatttgcaggtcaggtttggtgacgggccgtggcaggatgtcaaggggctggatgaagtgggcagtgatacaggcagaacaggagaatga

SEQ ID NO: 255 - DNA, 1356 bp, Escherichia coli; identical to SEQ ID NO: 192

SEQ ID NO: 256 - DNA, 1305 bp, Escherichia coli; identical to SEQ ID NO: 182

SEQ ID NO: 257 - DNA, 1314 bp, Escherichia coli; identical to SEQ ID NO: 176

SEQ ID NO: 258 - DNA, 1314 bp, Escherichia coli; identical to SEQ ID NO: 173

SEQ ID NO: 259 - DNA, 1224 bp, Escherichia coli; identical to SEQ ID NO: 174

SEQ ID NO: 260 - DNA, 1314 bp, Escherichia coli
atggcagtaaagatttcaggtgtactgaaagacggcacaggaaaaccggtagagaactgcaccattcaactgaaagccagacggaccagcagcacggtggtggtgaacacggtggcctctgaaaatccggatgaagccggtcgttacagcatggacgttgagtacggtcagtacagcgtcattctgttggtggagggcttcccgccgtcacatgccgggaccatcaccgtgtatgaagattctcaaccggggacgctgaatgattttctcggtgccatgtcggaggatgacgtccggccggaggcactgcgtcgttttgaactgatggtggaagaagcggcgcgtcacgctgaggaggcgaagaagaatgccggagaggcggagacatcagcgaggaatgccggcatatcatccagtaaggcggaagcgagcgcggcaaatgctgacacttcagcaggggatgcattggagtcagcccggcaggcggcagaaagtgcagccgctgcaaagcagtcagaggatgcgtcctcgtcctcggcttctgcggccgctcaaaaagccagtgagtcatcacaaagtgcagcagaagctgaattgtcaagaaagacggcagaaagtgcagccggtaatgcagccagggatgcaacgaccgcaacagaaaaagcccgggagtcagcagaaagcgcacagtcagcggaacaaagcaggatagcggcggaagaggccgtaaaccgaatccccaccgtggtgggacctcccgggccaaagggggaacaggggcccgcgggtcctcaggggccgaagggtgataagggagagcgcggtgacaccggccctgtcggggcaaccggcgaacggggaccggcaggtgatgctggtccggcaggcccgcaggggccgaaaggtgacaggggagagcggggagagaccggtctgacgggaaatgcaggtccacagggtccaaagggagataccggtgcggcaggcccggcaggcccacagggaccgaaaggagaaacaggtgcggctggcccggtgggggcaaccggacctcaggggccgaagggcgacccgggggagacgcaaatacggttccgtctggggccgggaaacattattgagacaaacagcaatggctggttcccggatacagatggtgcgctcatcaccggactgacctttcttgcccccaaagataccacacgggttcagggtttttttcagcatttgcaggtcaggtttggtgacgggccgtggcaggatgttaaggggctggatgaagtgggcagtgatacaggcagaacaggagaatga

SEQ ID NO: 261 - DNA, 1314 bp, Escherichia coli; identical to SEQ ID NO: 180

SEQ ID NO: 262 - DNA, 1314 bp, Escherichia coli; identical to SEQ ID NO: 177

SEQ ID NO: 263 - DNA, 1314 bp, Escherichia coli; identical to SEQ ID NO: 175

SEQ ID NO: 264 - DNA, 1317 bp, Escherichia coli; identical to SEQ ID NO: 185

SEQ ID NO: 265 - DNA, 1215 bp, Escherichia coli; identical to SEQ ID NO: 170

SEQ ID NO: 266 - DNA, 1314 bp, Escherichia coli
atggcagtaaagatttcaggtgtactgaaagacggcacaggaaaaccggtagagaactgtaccattcaactgaaagccagacggaccagcagcacggtggtggtgaacacggtggcctctgaaaatccggatgaagccggtcgttacagcatggacgttgagtacggtcagtacagcgtcattctgttggtggaaggattcccgccgtcacatgccgggaccatcaccgtgtatgaagattctcaaccggggacgctgaatgattttctcggtgccatgtcggaggatgacgtccgtccggaggcactgcgtcgttttgaactgatggtggaagaagcagcgcgtcacgcagaggaggcgaagaagaatgccggagaagcagagacgtccgcgaggaatgccggcatatcagccagtaaggcggaagcgagcgctgcaaatgctgatacttcagcagaggatgcatcggagtcagcccggcaggcggcagaaagtgcagccgctgcaaagcagtcagaggaggcgtcctcgtcctcggcctctgcggccgctcaaaaagccagtgagtcattacaaagtgcagcagaagctgaattgtcaagaaagacggcagaaagtgcagccggtaatgcagccagggatgcaacgaccgcaacagaaaaagcccgggagtcagcagaaagcgcacagtcagcggaacaaagcaggatagcggcggaagaggccgtaaaccgaatccccaccgtggtgggacctcccgggccaaagggggaacaggggcccgcgggtcctcaggggccgaagggtgataagggagagcgcggtgacaccggccctgtcggggcaaccggtgaacggggaccggcaggtgatgctggtccggcaggcccgcaggggccgaaaggtgacaggggagagcggggagagaccggtctgacgggaaatgcaggtccacagggtccaaagggagataccggtgcggcaggcccggcaggcccacagggaccgaaaggagaaacaggtgcggctggcccggtgggggcaaccggacctcaggggccgaagggcgacccgggggaggcacaaatacggttccgtctggggccgggaaacattattgagacaaacagcaatggctggttcccggatacagatggcgcactcatcaccggactgacctttcttgcccccaaagatgccacacgggttcagggtttttttcagcatttgcaggtcaggtttggtgacgggccgtggcaggatgttaaggggcttgatgaagtgggcagtgatacaggcagaacaggagaatga

SEQ ID NO: 267 - DNA, 1314 bp, Escherichia coli
atggcagtaaagatttcaggtgtactgaaagacggcacaggaaaaccggtagagaactgcaccattcaactgaaagccagacggaccagcagcacggtggtggtgaacacggtggcctctgaaaatccggatgaagccggtcgttacagcatggacgttgagtacggtcagtacagcgtcattctgttggtggaaggattcccgccgtcacatgccgggaccatcaccgtgtatgaagattctcaaccgggtacgctgaatgattttctcggtgccatgtcggaggatgacgtccggccggaggcactgcgtcgttttgaactgatggtggaagaagcggcgcgtcacgctgaggaggcgaagaagaatgccggagaggcggagacgtccgcgaggaatgccggcatatcagccagtcaggcagaagagagcgctgcaaatgctgacacttcagcaggggatgcatcggagtcagcccggcaggcggtggaaagtgcagcctcagcaaagcagtcagaggaggcgtcctcgtcctcggcttctgcggccgctcaaaaagccagtgagtcatcacaaagtgcagcagaagctgaattgtcaagaaagacggcagaaagtgcagccggtaatgcagccagggatgcaacgaccgcaacagaaaaagcccgggagtcagcagaaagcgcacagtcagcggaacaaagcaggatagcggcggaagaggccgtaaaccgaatccccaccgtggtgggacctcccgggccaaagggggaacaggggcccgcgggtcctcaggggccgaagggtgataagggagagcgcggtgacaccggccctgtcggggcaaccggtgaacggggaccggcaggtgatgctggtccggcaggcccgcaggggccgaaaggtgacaggggagagcggggagagaccggtctgacgggaaatgcaggtccacagggtccaaagggagataccggtgcggcaggcccggcaggcccacagggaccgaaaggagaaacaggtgcggctggcccggtgggggcaaccggacctcaggggccgaagggcgacccgggggaggcacaaatacggttccgtctggggccgggaaacattattgagacaaacagcaatggctggttcccggatacagatggcgcactcatcaccggactgacctttcttgcccccaaagatgccacacgggttcagggtttttttcagcatttgcaggtcaggtttggcgacgggccgtggcaggatgtcaaggggctggatgaagtgggcagtgatacaggcagaacaggagaatga

SEQ ID NO: 268 - DNA, 1314 bp, Escherichia coli
atggcagtaaagatttcaggtgtactgaaagacggcacaggaaaaccggtacagaactgcacaatccagctgaaagcaaaacgtaacagtaccactgtggtggtgaacacgctggcctcagaaaatccggatgaagccgggcgttacagcatggacgttgagtacggtcagtacagcgttattctgttggtggagggattcccgccgtcacatgccgggaccatcaccgtgtatgaagattctcaaccgggtacgctgaatgattttctcggtgccatgacggaggatgatgcccgtccggaggctctgcgtcgttttgaacagatggtggaagaagcagcgcgtcacgcagaggaggcgaagaagaatgccggagaagcagagacgtccgcgaggaatgccggcatatcagccagtaaggcggaagcgagcgccgcaaatgctgatacttcagcagaggatgcatcggagtcagcccggcaggcggcagaaagtgcagcctctgcaaagaagtcagaggaagcgtcctcgtcctcagcctctgaggccgctcaaaaagccagtgagtcattacaaagtgcaacagatgccgagttgtcaaaaaagacggcagaaagtgcagccggtaatgcatccagagacgcaacgacagcaacagaaaaagcccgggagtcagcagaaagcgcacagtcagcggaacaaagcaggatagcggcggaagaagccgtaaaccgaatccccaccgtggtggggccacccgggccaaagggagatccggggcccgcgggtcctcaggggccgaagggagataaaggagagcgtggcgacaccggcccggcaggggcaactggtgaacgggggccggcaggtgatgctggtccggcaggcccgcaggggccgaaaggcgacaggggagagcggggagagaccggtctgacgggaaatgcaggtccacaggggccaaagggagataccggtgcggcaggcccggctggcccacagggaccgaaaggagaaacaggtgcggctggcccggtgggggcaaccggacctcagggaccaaagggcgacccgggggagacacaaatccgttttcgtctggggccggcgagcattattgagacaaacagcaatggctggttcccgggtacagatggtgcgctcatcaccggactgacctttcttgaccccaaagatgccacacaggttcaggggctgtttcagcatttgcaggtcaggtttggtgacgggccgtggcaggatgttaaggggcttgatgaagtgggcagtgatacaggcagaacaggagaatga

SEQ ID NO: 269 - DNA, 1323 bp, Escherichia coli
atggcagtaaagatttcaggtgtactgaaagacggcacaggaaaaccggtagagaactgtaccattcaactgaaagccagacggaccagcagcacggtggtggtgaacacggtggcctctgaaaatccggatgaagccgggcgttacagcatggacgttgagtacggtcagtacagcgtcattctgttggtggaaggattcccgccgtcacatgccgggaccatcaccgtgtatgaagattctcaaccggggacgctgaatgattttctcggtgccatgtcggaggatgacgtccggccggaggcactgcgccgttttgaactgatggtggaagaggtggcgcgtcacgctgaggaggcgaagaagaatgccggagaggcggagacgtcagcgaggaatgccggcatatcagccagtcaggcagaagagagcgctgcaaatgctgacacttcagcaggggaggcatcggagtcagcccggcaggcggcagaaagtgcagcctcagcaaagcagtcagaggatgcgtcctcgtcctcggcttctgcggccgctcaaaaagccagtgagtcatcacaaagtgcagcagaagctgaattgtcaagaaagacggcagaaagtgcagccggtaatgcagccagggatgcaacgaccgcaacagaaaaagcccgggagtcagcagaaagcgcacagtcagcggaacaaagcaggatagcggcggaagaagccgtaaaccgaatccccacagtggtggggccacccgggccaaagggagaaccggggcccgcgggtcctcaggggccgaagggagataaaggagagcgtggcgacaccggtcctgtcggggcaaccggtgaacggggaccggcaggtgatgctggtccggcaggcccgcaggggccgaaaggcgacaggggagagcggggagagaccggtctgacgggaaatgcaggtccacagggtccaaagggagataccggtgcggcaggcccggcaggcccggcaggcccacagggaccgaaaggagaaacaggtgcggctggcccggtgggggcaaccggacctcagggaccgaagggcgacccgggggagacacaaatccgttttcgtctggggccggcgagcattattgagacaaacagcaatggctggttcccgggtacagatggtgcgctcatcaccggactgacctttcttgaccccaaagatgccacacaggttcaggggctgtttcagcatttgcaggtcaggtttggtgacgggccgtggcaggatgttaaggggctggatgaagtgggcagtgatacaggcagaacaggagaatga

SEQ ID NO: 270 - DNA, 1314 bp, Escherichia coli
atggcagtaaagatttcaggtgtactgaaagacggcacaggaaaaccggtagagaactgcaccattcaactgaaagccagacggaccagcagcacggtggtggtgaacacggtggcctctgaaaatccggatgaagccggtcgttacagcatggacgttgagtacggtcagtacagcgtcattctgttggtggaaggattcccgccgtcacatgccgggaccatcaccgtgtatgaagattctcaaccggggacgctgaatgattttctcggtgccatgtcggaggatgacgtccggccggaggcactgcgtcgttttgaactgatgttggaagaagcggcgcgtcacgctgaggaggcgaagaagaatgccggagaggcggagacgtccgcgaggaatgccggcatatcagccagtcaggcagaagagagcgctgcaaatgctgacacttcagcaggggatgcatcggagtcagcccggcaggcggcagaaagtgcagccgctgcaaagcagtcagaggaggcgtcctcgtcctcggcctctgcggccgctcaaaaagccagtgagtcatcacaaagtgcagcagaagctgaattgtcaagaaagacggcagaaagtgcagccggtaatgcagccagggatgcaacgaccgcaacagaaaaagcccgggagtcagcagaaagcgcacagtcagcggaacaaagcaggatagcggcggaagaggccgtaaaccgaatccccaccgtggtgggacctcccgggccaaagggggaacaggggcccgcgggtcctcaggggccgaagggtgataagggagagcgcggtgacaccggccctgtcggggcaaccggcgaacggggaccggcaggtgatgctggtccggcaggcccgcaggggccgaaaggtgacaggggagagcggggagagaccggtctgacgggaaatgcaggtccacagggtccaaagggagataccggtgcggcaggcccggcaggcccacagggaccgaaaggagaaacaggtgcggctggcccggtgggggcaaccggacctcagggaccgaagggcgacccgggggagacacaaatccgttttcgtctggggccggcgagcattattgagacaaacagcaatggctggttcccggatacagatggcgcactcatcaccggactgacctttcttgaccccaaagatgccacacaggttcaggggctgtttcggcatttgcaggtcaggtttggtgacgggccgtggcaggatgttaaggggctggatgaagtgggcagtgatacaggcagaacaggagaatga

SEQ ID NO: 271 - DNA, 1314 bp, Escherichia coli
atggcagtaaagatttcaggtgtactgaaagacggcacaggaaaaccggtagagaactgcaccattcaactgaaagccagacggaccagcagcacggtggtggtgaacacggtggcctctgaaaatccggatgaagccggtcgttacagcatggacgttgagtacggtcagtacagcgtcattctgttggtggagggcttcccgccgtcacatgccgggaccatcaccgtgtatgaagattctcaacccggtacgctgaatgattttctcggtgccatgtcggaggatgacgtccggccggaggcactgcgccgttttgaactgatggtggaagaggtggcgcgtcacgctgaggaggcgaagaagaatgccggagaggcggagacgtcagcgaggaatgccggcatatcagccagtcaggcagaagagagcgctgcaaatgctgacacttcagcaggggaggcatcggagtcagcccggcaggcggcagaaagtgcagcctcagcaaagcagtcagaggatgcgtcctcgtcctcggcttctgcggccgctcaaaaagccagtgagtcatcacaaagtgcagcagaagctgaattgtcaagaaagacggcagaaagtgcagccggtaatgcagccagggatgcaacgaccgcaacagaaaaagcccgggagtcagcagaaagcgcacagtcagcggaacaaagcaggatagcggcggaagaagccgtaaaccgaatccccacagtggtggggccacccgggccaaagggagaaccggggcccgcgggtcctcaggggccgaagggagataaaggagagcgtggcgacaccggtcctgtcggggcaaccggtgaacggggaccggcaggtgatgctggtccggcaggcccgcaggggccgaaaggcgacaggggagagcggggagagaccggtctgacgggaaatgcaggtccacagggtccaaagggagataccggtgcggcaggcccggcaggcccacagggaccgaaaggagaaacaggtgcggctggcccggtgggggcaaccggacctcagggaccgaagggcgacccgggggagacacaaatccgttttcgtctggggccggcgagcattattgagacaaacagccatggctggttcccggatacagatggtgcgctcatcaccggactgacctttcttgaccccaaagatgccacacgggttcagggtttttttcagcatttgcaggtcaggtttggtgacgggccgtggcaggatgttaaggggctggatgaagtgggcagtgatacaggcagaacaggagaatga

SEQ ID NO: 272 - DNA, 1314 bp, Escherichia coli
atggcagtaaagatttcaggtgtactgaaagacggcacaggaaaaccggtagagaactgcaccattcaactgaaagccagacggaccagcagcacggtggtggtgaacacggtggcctctgaaaatccggatgaagccggtcgttacagcatggacgttgagtacggtcagtacagcgtcattctgttggtggaaggattcccgccgtcacatgccgggaccatcaccgtgtatgaagattctcaaccggggacgctgaatgattttctcggtgccatgtcggaggatgacgtccggccggaggcactgcgtcgttttgaactgatgttggaagaagcggcgcgtcacgctgaggaggcgaagaagaatgccggagaggcggagacgtccgcgaggaatgccggcatatcagccagtcaggcagaagagagcgctgcacatgctgacacttcagcaggggatgcatcggagtcagcccggcaggcggcagaaagtgcagccgctgcaaagcagtcagaggaggcgtcctcgtcctcggcctctgcggccgctcaaaaagccagtgagtcatcacaaagtgcagcagaagctgaattgtcaagaaagacggcagaaagtgcagccggtaatgcagccagggatgcaacgaccgcaacagaaaaagcccgggagtcagcagaaagcgcacagtcagcggaacaaagcaggatagcggcggaagaggccgtaaaccgaatccccaccgtggtgggacctcccgggccaaagggggaacaggggcccgcgggtcctcaggggccgaagggtgataagggagagcgcggtgacaccggccctgtcggggcaaccggcgaacggggaccggcaggtgatgctggtccggcaggcccgcaggggccgaaaggtgacaggggagagcggggagagaccggtctgacgggaaatgcaggtccacagggtccaaagggagataccggtgcggcaggcccggcaggcccacagggaccgaaaggagaaacaggtgcggctggcccggtgggggcaaccggacctcagggaccgaagggcgacccgggggagacacaaatccgttttcgtctggggccggcgagcattattgagacaaacagcaatggctggttcccggatacagatggcgcactcatcaccggactgacctttcttgaccccaaagatgccacacaggttcaggggctgtttcggcatttgcaggtcaggtttggtgacgggccgtggcaggatgttaaggggctggatgaagtgggcagtgatacaggcagaacaggagaatga

SEQ ID NO: 273 - DNA, 1313 bp, Escherichia coli
atggcagtaaagatttcaggtgtactgaaagacggcacaggaaaaccggtagagaactgcaccattcaactgaaagccagacggaccagcagcacggtggtggtgaacacggtggcctctgaaaatccggatgaagccgtcgttacagcatggacgttgagtacggtcagtacagcgtcattctgttggtggagggcttcccgccgtcacatgccgggaccatcaccgtgtatgaagattctcaacccggtacgctgaatgattttctcggtgccatgtcggaggatgacgtccggccggaggcactgcgccgttttgaactgatggtggaagaggtggcgcgtcacgctgaggaggcgaagaagaatgccggagaggcggagacgtcagcgaggaatgccggcatatcagccagtcaggcagaagagagcgctgcaaatgctgacacttcagcaggggaggcatcggagtcagcccggcaggcggcagaaagtgcagcctcagcaaagcagtcagaggatgcgtcctcgtcctcggcttctgcggccgctcaaaaagccagtgagtcatcacaaagtgcagcagaagctgaattgtcaagaaagacggcagaaagtgcagccggtaatgcagccagggatgcaacgaccgcaacagaaaaagcccgggagtcagcagaaagcgcacagtcagcggaacaaagcaggatagcggcggaagaggccgtaaaccgaatccccaccgtggtgggacctcccgggccaaagggggaacaggggcccgcgggtcctcaggggccgaagggtgataagggagagcgcggtgacaccggccctgtcggggcaaccggcgaacggggaccggcaggtgatgctggtccggcaggcccgcaggggccgaaaggtgacaggggagagcggggagagaccggtctgacgggaaatgcaggtccacagggtccaaagggagataccggtgcggcaggcccggcaggcccacagggaccgaaaggagaaacaggtgcggctggcccggtgggggcaaccggacctcagggaccgaagggcgacccgggggagacacaaatccgttttcgtctggggccggcgagcattattgagacaaacagcaatggctggttcccggatacagatggcgcactcatcaccggactgacctttcttgaccccaaagatgccacacaggttcaggggctgtttcggcatttgcaggtcaggtttggtgacgggccgtggcaggatgttaaggggctggatgaagtgggcagtgatacaggcagaacaggagaatga

SEQ ID NO: 274 - DNA, 1314 bp, Escherichia coli
atggcagtaaagatttcaggtgtactgaaagacggcacaggaaaaccggtagagaactgcaccattcaactgaaagccagacggaccagcagcacggtggtggtgaatacggtggcctctgaaaatccggatgaagccggtcgttacagcatggacgttgagtacggtcagtacagcgtcattctgttggtggagggcttcccgccgtcacatgccgggaccatcaccgtgtatgaagattctcaaccggggacgctgaatgattttctcggtgccatgtcggaggatgacgtccggccggaggcactgcgccgttttgaactgatggtggaagaggtggcgcgtcacgcagaggaggcgaagaagaatgccggagaggcggagacgtcagcgaggaatgccggcatatcagccagtcaggcagaagagggcgctgcaaatgctgacacttcagcaggggaggcatcggagtcagcccggcaggcggcagaaagtgcagccgctgcaaagcagtcagaggaagcgtcctcgtcctcggcctctgcggccgctcaaaaagccagtgagtcatcacaaagtgcagcagaagctgaattgtcaagaaagacggcagaaagtgcagccggtaatgcagccagggatgcaacgaccgcaacagaaaaagcccgggagtcagcagaaagcgcacagtcagcggaacaaagcaggatagcggcggaagaggccgtaaaccgaatccccaccgtggtggggcctcccgggccaaagggggaaccgggtcccgcgggtcctcaggggccgaagggagataaaggagagcgtggcgacaccggcccggcaggggcaaccggtgaaagggggccgagaggagatactggtccggcaggcccgcaggggccgaaaggcgacaggggagagcggggagagaccggtctgacgggagatgcaggtccacagggtccaaagggagataccggtgcggcaggcccggcaggcccacagggaccgaaaggagaaacaggtgcggctggcccggtgggggcaaccggacctcagggaccgaagggcgacccgggggagacacaaatccgttttcgtctggggccggcgagcattattgagacaaacagcaatggctggttcccggatacagatggcgcactcatcaccggactgacctttcttgaccccaaagatgccacacgggttcagggtttttttcagcatttgcaggtcagatttggcgacgggccgtggcaggatgtcaaggggctggatgaagtgggcagtgatacaggcagaacaggagaatga

SEQ ID NO: 275 - DNA, 1314 bp, Escherichia coli
atggcagtaaagatttcaggtgtactgaaagacggcacaggaaaaccggtagagaactgcacaattcaactgaaagccagacggaccagcagcacggtggtggtgaacacggtggcctctgaaaatccggatgaagccggtcgttacagcatggacgttgagtacggtcagtacagcgtcattctgttggtggagggcttcccgccgtcacatgccgggaccatcaccgtgtatgaagattctcaacccggtacgctgaatgattttctcggtgccatgtcggaggatgacgtccggccggaggcactgcgccgttttgaactgatggtggaagaggtggcgcgtcacgctgaggaggcgaagaagaatgccggagaggcggagacgtcagcgaggaatgccggcatatcagccagtcaggcagaagagagcgctgcaaatgctgacacttcagcaggggaggcatcggagtcagcccggcaggcggcagaaagtgcagcctcagcaaagcagtcagaggaggcgtcctcgtcctcggcttctgcggccgctcaaaaagccagtgagtcatcacaaagtgcagcagaagctgaattgtcaagaaagacggcagaaagtgcagccggtaatgcagccagggatgcaacgaccgcaacagaaaaagcccgggagtcagcagaaagcgcacagtcagcggaacaaagcaggatagcggcggaagaagccgtaaacagaatccccaccgtggtgggacctcccgggccaaagggggaacaggggcccgcgggtactcaggggccgaagggtgataagggagagcgcggtgacaccggccctgtcggggcaaccggcgaacggggaccggcaggtgatgctggtccggcaggcccgcaggggccgaaaggtgacaggggagagcggggagagaccggtctgacgggaaatgcaggtccacagggtccaaagggagacaccggggcagcaggcccggcaggcccgcagggaccgaaaggagaaacaggtgcggctggcccggtgggggcaaccggacctcagggaccgaagggcgacccgggggagacacaaatccgttttcgtctggggccggcgagcattattgagacaaacagcaatggctggttcccgggtacagatggtgcgctcatcaccggactgacctttcttgaccccaaagatgccacacaggttcaggggatgtttcagcatttgcaggtcagatttggcgacgggccgtggcaggatgtcaaggggctggatgaagtgggcagtgatacaggcagaacaggagaatga

SEQ ID NO: 276 - DNA, 1314 bp, Escherichia coli
atggcagtaaagatttcaggtgtactgaaagacggcacaggaaaaccggtagagaactgcaccattcaactgaaagccagacggaccagcagcacggtggtggtgaacacggtggcctctgaaaatccggatgaagccggtcgttacagcatggacgttgagtacggtcagtacagcgtcattctgttggtggaaggattcccgccgtcacatgccgggaccatcaccgtgtatgaagattctcaaccggggacgctgaatgattttcttggtgccatgtcggaggatgacgtccggccggaggcactgcgtcgttttgaactgatggtggaagaagcggcgcgtcacgctgaggaggcgaagaagaatgccggagaggcggagacgtccgcgaggaatgccggcatatcatccagtaaggcggaagcgagcgcggcaaatgctgacacttcagcaggggatgcatcggagtcagcccggcaggcggcagaaagtgcagccgctgcaaagcagtcagaggaggcgtcctcgtcctcggcctctgcggccgctcaaaaagccagtgagtcatcacaaagtgcagcagaagctgaattgtcaagaaagacggcagaaagtgcagccggtaatgcagccagggatgcaacgaccgcaacagaaaaagcccgggagtcagcagaaagcgcacggtcagcggaacaaagcaggatagcggcggaagaagccgtaaaccgaatcccgaccgtggtggggcctcccgggccaaagggggaaccgggtcccgcgggtcctcaggggccgaagggtgataagggagagcgcggtgacaccggccctgtcggggcaaccggcgaacggggaccggcaggtgatgctggtccggcaggcccgcaggggccgaaaggtgacatgggagagcggggagagaccggtctgacgggaaatgcaggtccacagggtccaaagggagataccggtgcggcaggcccggcaggcccacagggaccgaaaggagaaacaggtgcggctggcccggtgggggcaaccggacctcagggaccgaagggcgacccgggggagacacaaatccgttttcgtctggggccggcgagcattattgagacaaacagcaatggctggttcccgggtacagatggtgcgctcatcaccggactgacctttcttgaccccaaagatgccacacaggttcaggggctgtttcagcatttgcaggtcaggtttggtgacgggccgtggcaggatgtcaaggggctggatgaagtgggcagtgatacaggcagaacaggagaatga

SEQ ID NO: 277 - DNA, 1314 bp, Escherichia coli
atggcagtaaagatttcaggtgtactgaaagacggcacaggaaaaccggtagagaactgtaccattcaactgaaagccagacggaccagcagcacggtggtggtgaacacggtggcctctgaaaatccggatgaagccgggcgttacagcatggacgttgagtacggtcagtacagcgtcattctgttggtggaaggattcccgccgtcacatgccgggaccatcaccgtgtatgaagattctcaacccggtacgctgaatgattttctcggtgccatgacggaggatgatgcccgtccggaggctctgcgccgttttgaactgatggtggaagaggtggcgcgtcacgctgaggaggcgaagaagaatgccggagaggcggagacgtcagcgaggaatgccggcatatcagccagtcaggcagaagagagcgctgcaaatgctgacacttcagcaggggaggcatcggagtcagcccggcaggcggcagaaagtgcagcctcagcaaagcagtcagaggatgcgtcctcgtcctcggcttctgcggccgctcaaaaagccagtgagtcatcacaaagtgcagcagaagctgaattgtcaagaaagacggcagaaagtgcagccggtaatgcagccagggatgcaacgaccgcaacagaaaaagcccgggagtcagcagaaagcgcacagtcagcggaacaaagcaggatagcggcggaagaggccgtaaaccgaatccccaccgtggtgggacctcccgggccaaagggggaacaggggcccgcgggtcctcaggggccgaagggtgataagggagagcgcggtgacaccggccctgtcggggcaaccggcgaacggggaccggcaggtgatgctggtccggcaggcccgcaggggccgaaaggtgacaggggagagcggggagagaccggtctgacgggaaatgcaggtccacagggtccaaagggagataccggtgcggcaggcccggcaggcccacagggaccgaaaggagaaacaggtgcggctggcccggtgggggcaaccggacctcagggaccgaagggcgacccgggggagacacaaatccgttttcgtctggggccggcgagcattattgagacaaacagccatggctggttcccggatacagatggtgcgctcatcaccggactgacctttcttgaccccaaagatgccacacaggttcaggggctgtttcggcatttgcaggtcaggtttggcgacgggccgtggcaggatgttaagggactggatgaagtgggcagtgatacaggcagaacaggagaatga

SEQ ID NO: 278 - DNA, 1314 bp, Escherichia coli; identical to SEQ ID NO: 172

SEQ ID NO: 279 - DNA, 1314 bp, Escherichia coli
atggcagtaaagatttcaggtgtactgaaagacggcacaggaaaaccggtagagaactgcaccattcaactgaaagccagacggaccagcagcacggtggtggtgaacacggtggcttcagaaaacccggatgaagccgggcgttacacaatggacgttgagtacggtcagtacagcgtcattctgttggtggaaggattcccgccgtcacatgccgggaccatcaccgtgtatgaagattctcaaccggggacgctgaatgattttctcggtgccatgtcggaggatgacgtccggccggaggcactgcgtcgttttgaactgatggtggaagaagcggcgcgtcacgctgaggaggcgaagaagaatgccggagaggcggagacgtcagcgaggaatgccggcatatcagccagtcaggcagaagagagcgctgcaaatgctgacacttcagcaggggaggcatcggagtcagcccggcaggcggcagaaagtgcagccgctgcaaagcagtcagaggaagcgtcctcgtcctcggcctctgcggccgctcaaaaagccagtgagtcatcacaaagtgcagcagaagctgaattgtcaagaaagacggcagaaagtgcagccggtaatgcagccagggatgcaacgaccgcaacagaaaaagcccgggagtcagcagaaagcgcacagtcagcggaacaaagcaggatagcggcggaagaggccgtaaaccgaatccccaccgtggtggggcctcccgggccaaagggggaaccgggtcccgcgggtcctcaggggccgaagggggataagggagagcgtggcgacaccggcccggcaggggcaaccggtgaaagggggccgagaggagatactggtccggcaggcccgcaggggccgaaaggcgacaggggagagcggggagagaccggtctgacgggagatgcaggtccacagggtccaaagggagataccggtgcggcaggcccggcaggcccacagggaccgaaaggagaaacaggtgcggctggcccggtgggggcaaccggacctcagggaccgaagggcgacccgggggagacacaaatccgttttcgtctggggccggcgagcattattgagacaaacagcaatggctggttcccgggtacagatggtgcgctcatcaccggactgacctttcttgaccccaaagatgccacacaggttcaggggctgtttcagcatttgcaggtcaggtttggtgacgggccgtggcaggatgttaaggggcttgatgaagtgggcagtgatacaggcagaacaggagaatga

SEQ ID NO: 280 - DNA, 1314 bp, Escherichia coli
atggcagtaaagatttcaggtgtactgaaagacggcacaggaaaaccggtagagaactgcaccattcaactgaaagccagacggaccagcagcacggtggtggtgaacacggtggcttcagaaaacccggatgaagccgggcgttacacaatggacgttgagtacggtcagtacagcgtcattctgttggtggaaggattcccgccgtcacatgccgggaccatcaccgtgtatgaagattctcaaccggggacgctgaatgattttctcggtgccatgtcggaggatgacgtccggccggaggcactgcgtcgttttgaactgatggtggaagaagcggcgcgtcacgctgaggaggcgaagaagaatgccggagaggcggagacgtcagcgaggaatgccggcatatcagccagtcaggcagaagagagcgctgcaaatgctgacacttcagcaggggaggcatcggagtcagcccggcaggcggcagaaagtgcagccgctgcaaagcagtcagaggaagcgtcctcgtcctcggcctctgcggccgctcaaaaagccagtgagtcatcacaaagtgcagcagaagctgaattgtcaagaaagacggcagaaagtgcagccggtaatgcagccagggatgcaacgaccgcaacagaaaaagcccgggagtcagcagaaagcgcacagtcagcggaacaaagcaggatagcggcggaagaggccgtaaaccgaatccccaccgtggtggggcctcccgggccaaagggggaaccgggtcccgcgggtcctcaggggccgaagggggataagggagagcgtggcgacaccggcccggcaggggcaaccggtgaaagggggccgagaggagatactggtccggcaggcccgcaggggccgaaaggcgacaggggagagcggggagagaccggtctgacgggagatgcaggtccacagggtccaaagggagataccggtgcggcaggcccggcaggcccacagggaccgaaaggagaaacaggtgcggctggcccggtgggggcaaccggacctcagggaccgaagggcgacccgggggagacacaaatccgttttcgtctggggccggcgagcattattgagacaaacagcaatggctggttcccggatacagatggcgcactcatcaccggactgacctttcttgaccccaaagatgccacacgggttcagggtttttttcagcatttgcaggtcagatttggcgacgggccgtggcaggatgtcaaggggctggatgaagtgggcagtgatacaggcagaacaggagaatga

SEQ ID NO: 281 - DNA, 1314 bp, Escherichia coli
atggcagtaaagatttcaggtgtactgaaagacggcacaggaaaaccggtagagaactgcaccattcaactgaaagccagacggaccagcagcacggtggtggtgaacacggtggcctctgaaaatccggatgaagccggtcgttacagcatggacgttgagtacggtcagtacagcgtcattctgttggtggagggcttcccgccgtcacatgccgggaccatcaccgtgtatgaagattctcaaccggggacgctgaatgattttcttggtgccatgtcggaggatgacgtccggccggaggcactgcgtcgttttgaactgatggtggaagaagcggcgcgtcacgctgaggaggcgaagaagaatgccggagaggcggagacgtccgcgaggaatgccggcatatcatccagtaaggcggaagcgagcgcggcaaatgctgacacttcagcaggggatgcatcggagtcagcccggcaggcggcagaaagtgcagccgctgcaaagcagtcagaggaggcgtcctcgtcctcggcctctgcggccgctcaaaaagccagtgagtcatcacaaagtgcagcagaagctgaattgtcaagaaagacggcagaaagtgcagccggtaatgcagccagggatgcaacgaccgcaacagaaaaagcccgggagtcagcagaaagcgcacggtcagcggaacaaagcaggatagcggcggaagaagccgtaaaccgaatcccgaccgtggtggggcctcccgggccaaagggggaaccgggtcccgcgggtcctcaggggccgaagggagataaaggagagcgtggcgacaccggcccggcaggggcaaccggtgaaagggggccggcaggtgatgctggtccggcaggcccgcaggggccgaaaggcgacaggggagagcggggagagaccggtctgacgggaaatgcaggtccacagggtccaaagggagataccggtgcggcaggcccggcaggcccacagggaccgaaaggagaaacaggtgcggcaggcccggtgggggcgaccggacctcaggggccgaagggcgacccgggggagacgcaaatacggttccgtctggggccgggaaacattattgagacaaacagccatggctggttcccggatacagatggcgcactcatcaccggactgacctttcttgaccccaaagataccacacgggttcagggtttttttcagcatttgcaggtcaggtttggtgacgggccgtggcaggatgttaagggactggatgaagtgggcagtgatacaggcagaacaggagaatga

SEQ ID NO: 282 - DNA, 1314 bp, Escherichia coli
atggcagtaaagatttcaggtgtactgaaagacggcacaggaaaaccggtagagaactgcaccattcaactgaaagccagacggaccagcagcacggtggtggtgaacacggtggcctctgaaaatccggatgaagccggtcgttacagcatggacgttgagtacggtcagtacagcgtcattctgttggtggagggcttcccgccgtcacatgccgggaccatcaccgtgtatgaagattcccgacccggtacgctgaatgattttctcggtgccatgtcggaggatgacgtccggccggaggcactgcgtcgttttgaactgatggtggaagaagcagcgcgtcacgccggggaggcgaagaagaatgccggagaggcggagacatcagcgaggaatgccggcatatcagccagtcaggcagaagagaacgctgcaaatgctgacacttcagcaggggatgcatcggagtcagcccggcaggcggcagaaagtgcagccgctgcaaagcagtcagaggaggcgtcctcgtcctcggcctctgcggccgctcaaaaagccagtgagtcatcacaaagtgcagcagaagctgaattgtcaagaaagacggcagaaagtgcagccggtaatgcagccagggatgcaacgaccgcaacagaaaaagcccgggagtcagcagaaagcgcacagtcagcggaacaaagcaggatagcggcggaagaggccgtaaaccgaatccccaccgtggtgggacctcccgggccaaagggggaacaggggcccgcgggtcctcaggggccgaagggtgataagggagagcgcggtgacaccggccctgtcggggcaaccggcgaacggggaccggcaggtgatgctggtccggcaggcccgcaggggccgaaaggtgacaggggagagcggggagagaccggtctgacgggaaatgcaggtccacagggtccaaagggagataccggtgcggcaggcccggcaggcccacagggaccgaaaggagaaacaggtgcggctggcccggtgggggcaaccggacctcagggaccgaagggcgacccgggggaggcacaaatccgttttcgtctggggccggcgagcattattgagacaaacagcaatggctggttcccggatacagatggcgcactcatcaccggactgacctttcttgaccccaaagatgccacacaggttcaggggctgtttcggcatttgcaggtcaggtttggtgacgggccgtggcaggatgttaaggggctggatgaagtgggcagtgatacaggcagaacaggagaatga

SEQ ID NO: 283 - DNA, 1314 bp, Escherichia coli
atggcagtaaagatttcaggtgtactgaaagacggcacaggaaaaccggtagagaactgcaccattcaactgaaagccagacggaccagcagcacggtggtggtgaacacggtggcctctgaaaatccggatgaagccggtcgttacagcatggacgttgagtacggtcagtacagcgtcattctgttggtggaaggattcccgccgtcacatgccgggaccatcaccgtgtatgaagattcccgacccggtacgctgaatgattttctcggtgccatgacggagggtgacgtccggccggaggcactgcgccgttttgaactgatggtggaagaggtggcgcgtcacgctgaggaggcgaagaagaatgccggagaggcggagacgtcagcgaggaatgccggcatatcagccagtcaggcagaagagagcgctgcaaatgctgacacttcagcaggggaggcatcggagtcagcccggcaggcggcagaaagtgcagccgctgcaaagcagtcagaggatgcgtcctcgtcctcggcttctgcggccgctcaaaaagccagtgagtcatcacaaagtgcagcagaagctgaattgtcaaaaaagacggcagaaagtgcagccggtaatgcagccagggatgcaacgaccgcaacagaaaaagcccgggagtcagcagaaagcgcacagtcagcggaacaaagcaggatagcggcggaagaagccgtaaacagaatccccaccgtggtgggacctcccgggccaaagggggaacaggggcccgcgggtcctcaggggccgaagggtgataagggagagcgcggtgacaccggccctgtcggggcaaccggcgaacggggaccggcaggtgatgctggtccggcaggcccgcaggggccgaaaggtgacaggggagagcggggagagaccggtctgacgggaaatgcaggtccacagggtccaaagggagacaccggggcagcaggcccggcaggcccacagggaccgaaaggagaaacaggtgcggctggcccggtgggggcaaccggacctcagggaccgaagggcgacccgggggagacacaaatacggttccgtctggggccgggaaacattattgagacaaacagccatggctggttcccggatacagatggcgcactcatcaccggactgacctttcttgaccccaaagatgccacacaggttcaggggctgtttcggcatttgcaggtcaggtttggtgacgggccgtggcaggatgttaaggggctgaatgaagtgggcagtgatacaggcagaacaggagaatga

SEQ ID NO: 284 - DNA, 1314 bp, Escherichia coli
atggcagtaaagatttcaggtgtactgaaagacggcacaggaaaaccggtagagaactgcaccattcaactgaaagccagacggaccagcagcacggtggtggtgaacacggtggcctctgaaaatccggatgaagccggtcgttacagcatggacgttgagtacggtcagtacagcgtcattctgttggtggaaggattcccgccgtcacatgccgggaccatcaccgtgtatgaagattcccgacccggtacgctgaatgattttctcggtgccatgacggagggtgacgtccggccggaggcactgcgccgttttgaactgatggtggaagaggtggcgcgtcacgctgaggaggcgaagaagaatgccggagaggcggagacgtccgcgaggaatgccggcatatcagccagtcaggcagaagagagcgctgcaaatgctgacacttcagcaggggatgcatcggagtcagcccggcaggcggcagaaagtgcagccgctgcaaagcagtcagaggaggcgtcctcgtcctcggcttctgcggccgctcaaaaagccagtgagtcatcacaaagtgcagcagaagctgaattgtcaagaaagacggcagaaagtgcagccggtaatgcagccagggatgcaacgaccgcaacagaaaaagcccgggagtcagcagaaagcgcacagtcagcggaacaaagcaggatagcggcggaagaggccgtaaaccgaatccccaccgtggtgggacctcccgggccaaagggggaacaggggcccgcgggtcctcaggggccgaagggtgataagggagagcgcggtgacaccggccctgtcggggcaaccggcgaacggggaccggcaggtgatgctggtccggcaggcccgcaggggccgaaaggtgacaggggagagcggggagagaccggtctgacgggaaatgcaggtccacagggtccaaagggagataccggtgcggcaggcccggcaggcccacagggaccgaaaggagaaacaggtgcggctggcccggtgggggcaaccggacctcagggaccgaagggcgacccgggggagacacaaatacggttccgtctggggccgggaaacattattgagacaaacagccatggctggttcccggatacagatggcgcactcatcaccggactgacctttcttgaccccaaagatgccacacaggttcaggggctgtttcggcatttgcaggtcaggtttggtgacgggccgtggcaggatgttaaggggctgaatgaagtgggcagtgatacaggcagaacaggagaatga

SEQ ID NO: 285 - DNA, 1314 bp, Escherichia coli; identical to SEQ ID NO: 171

SEQ ID NO: 286 - DNA, 1314 bp, Escherichia coli
atggcagtaaagatttcaggtgtactgaaagacggcacaggaaaaccggtagagaactgcaccattcaactgaaagccagacggaccagcagcacggtggtggtgaacacggtggcctctgaaaatccggatgaagccggtcgttacagcatggacgttgagtacggtcagtacagcgtcattctgttggtggagggattcccgccgtcacatgccgggaccatcaccgtgtatgaagattctcaaccggggacgctgaatgattttctcggtgccatgtcggaggatgacgtccgtccggaggcactgcgtcgttttgaactgatggtggaagaggtggcgcgtcacgcagaggaggcgaagaagaatgccggagaagcagagacgtccgcgaggaatgccggcatatcagtcagtcaggcggaagcgagcgcggcaaatgctgacacttcagcaggggaggcatcggagtcagcccggcaggcggcagaaagtgcagcctcagcaaagaagtcagaggatgcgtcctcgtcctcggcttctgcggccgctcaaaaagccagtgagtcatcacaaagtgcagcagaagctgaattgtcaagaaagacggcagaaagtgcagccggtaatgcagccagggatgcaacgaccgcaacagaaaaagcccgggagtcagcagaaagcgcacagtcagcggaacaaagcaggatagcggcggaagaggccgtaaaccgaatccccaccgtggtgggacctcccgggccaaagggggaacaggggcccgcgggtcctcaggggccgaagggggataagggagagcgcggtgacaccggccctgtcggggcaaccggcgaacggggaccggcaggtgatgctggtccggcaggcccgcaggggccgaaaggcgacaggggagagcagggaaagaccggtctgacgggagatgcaggtccacagggtccaaagggagataccggtacggcaggcccggcaggcccacagggaccgaaaggagaaacaggtgcggctggcccggtaggggcaaccggacctcagggaccaaagggcgacccgggggagacgcaaatacggttccgtctggggccgggaaacattattgagacaaacagcaatggctggttcccggatacagatggtgcgctcatcaccggactgacctttcttgaccccaaagatgccacacgggttcaggggttttttcagcatttgcaggtcaggtttggtgacgggccatggcaggatgttaagggactggatgaagtgggcagtgatacaggcagaacaggagaatga

SEQ ID NO: 287 - DNA, 1323 bp, Escherichia coli
atggcagtaaagatttcaggtgtactgaaagacggcacaggaaaaccggtagagaactgcaccattcaactgaaagccagacggagcagcagcacggtggtggtgaacacggtggcctctgaaaatccggatgaagccggtcgttacagcatggacgttgagtacggtcagtacagcgtcattctgttggtggagggattcccgccgtcacatgccgggaccatcaccgtgtatgaagattctcaacccggtacgctgaatgattttctcggtgccatgtcggaggatgacgtccggccggaggcactgcgccgttttgaactgatggtggaagaggtggcgcgtcacgctgaggaggcgaagaagaatgccggagaggcggagacgtcagcgaggaatgccggcatatcagccagtcaggcagaagagagcgctgcaaatgctgacacttcagcaggggaggcatcggagtcagcccggcaggcggcagaaagtgcagcctcagcaaagcagtcagaggatgcgtcctcgtcctcggcttctgcggccgctcaaaaagccagtgagtcatcacaaagtgcagcagatgctgagttgtcaaaaaagacggcagaaagtgcagccggtaatgcagccagggatgcaacgaccgcaacagaaaaagcccgggagtcagcagaaagcgcacagtcagcggaacaaagcaggatagcggcggaagaggccgtaaaccgaatccccaccgtggtgggacctcccgggccaaagggggaacaggggcccgcgggtcctcaggggccgaagggtgataagggagagcgcggtgacaccggccctgtcggggcaaccggcgaacggggaccggcaggtgatgctggtccggcaggcccgcaggggccgaaaggtgacaggggagagcggggagagaccggtctgacgggaaatgcaggtccacagggtccaaagggagataccggtgcggcaggcccggcaggctcggcaggcccacagggaccgaaaggagaaacaggtgcggctggcccggtgggggcaaccggacctcagggaccgaagggcgacccgggggagacacaaatacggttccgtctggggccgggaaacattattgagacaaacagccatggctggttcccggatacagatggcgcactcatcaccggactgacctttcttgcccccaaagatgccacacgggttcagggtttttttcagcatttgcaggtcaggtttggtgacgggccgtggcaggatgttaaggggctggatgaagtgggcagtgatacaggcagaacaggagaatga

SEQ ID NO: 288 - DNA, 1314 bp, Escherichia coli
atggcagtaaagatttcaggtgtactgaaagacggcacaggaaaaccggtagagaactgcaccattcaactgaaagccagacggaccagcagcacggtggtggtgaacacggtggcctctgaaaatccggatgaagccggtcgttacagcatggacgttgagtacggtcagtacagcgtcattctgttggtggaaggattcccgccgtcacatgccgggaccatcaccgtgtatgaagattctcaacccggtacgctgaatgattttctcggtgccatgtcggaggatgacgtccggccggaggcactgcgtcgttttgaactgatggtggaagaagcggcgcgtcacgctgaggaggcgaagaagaatgccggagaggcggagacgtccgcgaggaatgccggcatatcagccagtcaggcagaagagagcgctgcaaatgctgacacttcagcaggggatgcatcggagtcagcccggcaggcggcagaaagtgcagccgctgcaaagcagtcagaggaggcgtcctcgtcctcggcttctgcggccgctcaaaaagccagtgagtcatcacaaagtgcagcagaagctgaattgtcaagaaagacggcagaaagtgcagccggtaatgcagccagggatgcaacgaccgcaacagaaaaagcccgggagtcagcagaaagcgcacagtcagcggaacaaagcaggatagcggcggaagaggccgtaaaccgaatccccaccgtggtgggacctcccgggccaaagggggaacaggggcccgcgggtcctcaggggccgaagggtgataagggagagcgcggtgacaccggccctgtcggggcaaccggcgaacggggaccggcaggtgatgctggtccggcaggcccgcaggggccgaaaggtgacaggggagagcggggagagaccggtctgacgggaaatgcaggtccacagggtccaaagggagataccggtgcggcaggcccggcaggcccacagggaccgaaaggagaaacaggtgcggctggcccggtgggggcaaccggacctcagggaccgaagggcgacccgggggagacacaaatccgttttcgtctggggccgggaaacattattgagacaaacagcaatggctggttcccggatacagatggcgcactcatcaccggactgacctttcttgcccccaaagatgccacacgggttcagggtttttttcagcatttgcaggtcaggtttggtgacgggccgtggcaggatgttaaggggctggatgaagtgggcagtgatacaggcagaacaggagaatga

SEQ ID NO: 289 - DNA, 1305 bp, Escherichia coli
atgacagtaaaaatttctggcgtgcttaaagatggcacaggaaaaccagtacagaactgcaccattgtgctgaaggccagacgaaccagcagcacggtggtggtgaacacggtggcctctgaaaatccggatgaagccggacgttacagcatggatgttgagtacggtcagtacagcgtcattctgttggtggagggatttcctccgtcacatgccgggaccatcaccgtgtatgaagattctcaaccggggacgctgaatgattttctcggtgccatgtcggaggatgacgtccggccggaggcactgcgtcgttttgaactgatggtggaagaagcggcgcgtcacgctgaggaggcgaagaagaatgccggagaggcggagacgtcagcgaggaatgccggcatatcagccagtcaggcagaagagagcgctgcaaatgctgacacttcagcaggggatgcatcggagtcagcccggcaggcggcagaaagtgcagccgctgcaaagcagtcagaggaggcgtcctcgtcctcggcctctgcggccgctcaaaaagccagtgagtcattacaaagtgcaacagatgctgagttgtcaaaaaagacggcagaaagtgcagccggtaatgcagccagggatgcaacgaccgcagcagaaaaagcccgggagtcagcagaaagcgcacagtcagcggaacaaagcaggatagcggcggaagaagccgtaaaccgaatccccaccgtggtggggcctcccgggccaaagggggaaccggggcccgcgggtcctcaggggccgaagggagataaaggagagcgtggagacaccggccctgtcggggcaaccggtgaacggggaccgagaggagatacaggtccggcaggtccgcaggggccgaaaggtgacaggggagagcggggagagaccggtctgacgggaaatgcaggtccacagggtccaaagggagataccggtgcggcaggcccacagggaccgaaaggagaaacaggtgcggctggcccggtgggggcaaccggacctcagggaccgaagggcgacccgggggagacacaaatacggttccgtctggggccgggaaacattattgagacaaacagcaatggctggttcccggatacagatggcgcactcatcaccggactgacctttcttgcccccaaagatgccacacgggttcagggtttttttcagcatttgcaggtcaggtttggtgacgggccgtggcaggatgttaaggggcttgatgaagtgggcagtgatacaggcagaacaggagaatga

SEQ ID NO: 290 - DNA, 1314 bp, Escherichia coli; identical to SEQ ID NO: 284

SEQ ID NO: 291 - DNA, 1314 bp, Escherichia coli; identical to SEQ ID NO: 281

SEQ ID NO: 292 - DNA, 1320 bp, Escherichia coli
gtgaatatggcagtaaagatttcaggtgtactgaaagacggcacaggaaaaccggtagagaactgcaccattcaactgaaagccagacggaccagcagcacggtggtggtgaacacggtggcctctgaaaatccggatgaagccggtcgttacagcatggacgttgagtacggtcagtacagcgtcattctgttggtggaaggattcccgccgtcacatgccgggaccatcaccgtgtatgaagattctcaacccggtacgctgaatgattttctcggtgccatgacggaggatgatgcccgtccggaggctctgcgccgttttgaactgatggtggaagaggtggcgcgtcacgctgaggaggcgaagaagaatgccggagaggcggagacgtcagcgaggaatgccggcatatcagccagtcaggcagaagagagcgctgcaaatgctgacacttcagcaggggaggcatcggagtcagcccggcaggcggcagaaagtgcagcctcagcaaagcagtcagaggatgcgtcctcgtcctcggcttctgcggccgctcaaaaagccagtgagtcatcacaaagtgcagcagaagctgaattgtcaagaaagacggcagaaagtgcagccggtaatgcagccagggatgcaacgaccgcaacagaaaaagcccgggagtcagcagaaagcgcacagtcagcggaacaaagcaggatagcggcggaagaggccgtaaaccgaatccccaccgtggtgggacctcccgggccaaagggggaacaggggcccgcgggtcctcaggggccgaagggtgataagggagagcgcggtgacaccggccctgtcggggcaaccggcgaacggggaccggcaggtgatgctggtccggcaggcccgcaggggccgaaaggtgacaggggagagcggggagagaccggtctgacgggaaatgcaggtccacagggtccaaagggagataccggtgcggcaggcccggcaggcccacagggaccgaaaggagaaacaggtgcggctggcccggtgggggcaaccggacctcagggaccgaagggcgacccgggggagacacaaatccgttttcgtctggggccggcgagcattattgagacaaacagcaatggctggttcccgggtacagatggtgcgctcatcaccggactgacctttcttgaccccaaagatgccacacaggttcaggggctgtttcagcatttgcaggtcaggtttggtgacgggccgtggcaggatgttaaggggctggatgaagtgggcagtgatacaggcagaacaggagaatga

SEQ ID NO: 293 - DNA, 1314 bp, Escherichia coli
atggcagtaaagatttcaggtgtactgaaagacggcacaggaaaaccggtagagaactgcaccattcaactgaaagccagacggaccagcagcacggtggtggtgaacacggtggcctctgaaaatccggatgaagccggtcgttacagcatggacgttgagtacggtcagtacagcgtcattctgttggtggaaggattcccgccgtcacatgccgggaccatcaccgtgtatgaagattctcaacccggtacgctgaatgattttctcggtgccatgacggaggatgatgcccgtccggaggcactgcgccgttttgaactgatggtggaagaggtggcgcgtcacgctgaggaggcgaagaagaatgccggagaggcggagacgtcagcgaggaatgccggcatatcagccagtcaggcagaagagagcgctgcaaatgctgacacttcagcaggggaggcatcggagtcagcccggcaggcggcagaaagtgcagcctcagcaaagcagtcagaggatgcgtcctcgtcctcggcttctgcggccgctcaaaaagccagtgagtcatcacaaagtgcagcagaagctgaattgtcaagaaagacggcagaaagtgcagccggtaatgcagccagggatgcaacgaccgcaacagaaaaagcccgggagtcagcagaaagcgcacagtcagcggaacaaagcaggatagcggcggaagaggccgtaaaccgaatccccaccgtggtgggacctcccgggccaaagggggaacaggggcccgcgggtcctcaggggccgaagggtgataagggagagcgcggtgacaccggccctgtcggggcaaccggcgaacggggaccggcaggtgatgctggtccggcaggcccgcaggggccgaaaggtgacaggggagagcggggagagaccggtctgacgggaaatgcaggtccacagggtccaaagggagataccggtgcggcaggcccggcaggcccacagggaccgaaaggagaaacaggtgcggctggcccggtgggggcaaccggacctcagggaccgaagggcgacccgggggagacacaaatccgttttcgtctggggccggcgagcattattgagacaaacagcaatggctggttcccgggtacagatggtgcgctcatcaccggactgacctttcttgaccccaaagatgccacacaggttcaggggttttttcagcatttgcaggtcaggtttggtgacgggccgtggcaggatgtcaaggggctggatgaagtgggcagtgatacaggcagaacaggagaatga

SEQ ID NO: 294 - DNA, 1236 bp, Escherichia coli
gtgaatatggcagtaaagatttcaggtgtactgaaagacggcacaggaaaaccggtagagaactgcaccattcaactgaaagccagacggaccagcagcacggtggtggtgaacacggtggtggtgaacacggtggcctctgaaaatccggatgaagccggtcgttacagcatggacgttgagtacggtcagtacagcgtcattctgttggtggaaggattcccgccgtcacatgccgggatcatcaccgtgtatgaagattctcaacccggtacgctgaatgattttctcggtgccatgtcggaggatgacgtccggccggaggcactgcgtcgttttgaactgatggtggaagaagcggcgcgtcacgctgaggaggcgaagaagaatgccggagaagcagagacgtccgcgaggaatgccggcatatcagccagtaaggcggaagcgagcgcggcaaatgctgacacttcagcaggggaagcatcggagtcagcccggcaggcgacggaaagtgcagcctcagcaaagcagtcagaggaggcgtcctcgtcctcggcctctgcggccgctcaaaaagccagtgagtcatcacaaagtgcagcagatgctgagttgtcaagaaagacggcagaaagtgcagccggtaatgcagccagggatgcaacgaccgcaacagaaaaagcccgggagtcagcagaaagcgcacagtcagcggaacaaagcaggatagcggcggaagaggccgtaaaccgaatccccacggtggtggggcctcccgggccaaagggggaaccgggtcccgcgggtcctcaggggccgaagggagataaaggagagcgtggagacaccggtccggcaggggcaaccggtgaaagggggccggcaggtgatgctggtccggcaggcccggcaggcccacagggaccgaaaggagaaacaggtgcggctggcccggtgggggcaaccggacctcaggggccgaagggcgacccgggggagacgcaaatacggttccgtctggggccgggaaacattattgagacaaacagccatggctggttcccggatacagatggcgcactcatcaccggactgacctttcttgaccccaaagatgccacacgggttcagggtttttttcagcatttgcaggtcaggtttggtgacgggccgtggcaggatgttaagggactggatgaagtgggcagtgatacaggcagaacaggagaatga

SEQ ID NO: 295 - DNA, 1314 bp, Escherichia coli
atggcagtaaagatttcaggtgtactgaaagacggcacaggaaaaccggtagagaactgcaccattcaactgaaagccagacggaccagcagcacggtggtggtgaacacggtggcctctgaaaatccggatgaagccggtcgttacagcatggacgttgagtacggtcagtacagcgtcattctgttggtggaaggattcccgccgtcacatgccgggaccatcaccgtgtatgaagattctcaacccggtacgctgaatgattttctcggtgccatgacggaggatgatgcccgtccggaggctctgcgccgttttgaactgatggtggaagaggtggcgcgtcacgctgaggaggcgaagaagaatgccggagaggcggagacgtcagcgaggaatgccggcatatcagccagtcaggcagaagagagcgctgcaaatgctgacacttcagcaggggaggcatcggagtcagcccggcaggcggcagaaagtgcagcctcagcaaagcagtcagaggatgcgtcctcgtcctcggcttctgcggccgctcaaaaagccagtgagtcatcacaaagtgcagcagaagctgaattgtcaagaaagacggcagaaagtgcagccggtaatgcagccagggatgcaacgaccgcaacagaaaaagcccgggagtcagcagaaagcgcacagtcagcggaacaaagcaggatagcggcggaagaggccgtaaaccgaatccccaccgtggtgggacctcccgggccaaagggggaacaggggcccgcgggtcctcaggggccgaagggtgataagggagagcgcggtgacaccggccctgtcggggcaaccggcgaacggggaccggcaggtgatgctggtccggcaggcccgcaggggccgaaaggtgacaggggagagcggggagagaccggtctgacgggaaatgcaggtccacagggtccaaagggagataccggtgcggcaggcccggcaggcccacagggaccgaaaggagaaacaggtgcggctggcccggtgggggcaaccggacctcagggaccgaagggcgacccgggggagacacaaatccgttttcgtctggggccggcgagcattattgagacaaacagcaatggctggttcccgggtacagatggtgcgctcatcaccggactgacctttcttgaccccaaagatgccacacaggttcaggggctgtttcagcatttgcaggtcaggtttggtgacgggccgtggcaggatgttaaggggctggatgaagtgggcagtgatacaggcagaacaggagaatga

SEQ ID NO: 296 - DNA, 1323 bp, Escherichia coli
gtgggtatggcagcagtacaaatatcaggcgtgctgaaagatggtgcgggaaaaccaatacagaactgcaccattcaactgaaagccagacgtaacagcaccacggtggtggtgaacacggtggcctctgaaaatccggatgaggcagggcgttacagcatggacgtcgagtatggtcagtacagcgtcactctgttggtggagggattcccgccatcacatgccgggaccatctccgtgtatgaagattctcaaccgggtacgctgaatgattttctcggtgccatgacggaggatgatgcccgtccggaggcactgcgtcgttttgaacagatggtggaagaagcagcgcgtcacgcagaggaggcgaagaagaatgccggagaagcagagacgtccgcgaggaatgccggcatatcagccagtaaggcggaagcgagcgccgcaaatgctgatacttcagcagaggatgcatcggagtcagcccggcaggcggcagaaagtgcagcctctgcaaagaagtcagaggaagcgtcctcgtcctcagcctctgaggccgctcaaaaagccagtgagtcattacaaagtgcaacagatgccgagttgtcaaaaaagacggcagaaagtgcagccggtaatgcagccagggatgcaacgaccgcaacagaaaaagcccgggaatcagcagaaagcgcacagtcagcggaacaaagcagaatagcggcggaagacgccgtaaacagaattcccaccgtggtggggcctcccggaccaaagggggaaccgggtcccgcgggtcctcaggggccgaagggagataaaggagagcgtggagacaccggtccggcaggggcaaccggtgaacggggaccgggaggagatacaggtccggcaggtccgcaggggccgaaaggcgacaggggagagcggggagagaccggtctgacaggaagtacaggtccacagggaccaaagggagataccggggcaacaggtccggcaggaccgcagggaccgaaaggggaaacaggtgcggctggcccggtgggggctaccggacctcagggggcgaagggcgacccgggggagacacaaatccgttttcgtctggggccggcgagcattattgagacaaacagctatggctggttcccgggtacagatggtgcgctcatcaccggactgacctttcttgaccccaaagatgccacacaggttcaggggatgtttcagcatttgcaggtcagatttggtgacgggccatggcaggatgttaagggactggatgaagtgggcagtgatacaggcagaactggagaatga

SEQ ID NO: 297 - DNA, 1323 bp, Escherichia coli
atggcagtaaagatttcaggtgtactgaaagacggcacaggaaaaccggtagagaactgcaccattcaactgaaagccagacggaccagcagcacggtggtggtgaacacggtggcctctgaaaatccggatgaagccggtcgttacagcatggacgttgagtacggtcagtacagcgtcattctgttggtggagggcttcccgccgtcacatgccgggaccatcaccgtgtatgaagattctcaaccggggacgctgaatgattttctcggtgccatgtcggaggatgacgtccggccggaggcactgcgtcgttttgaactgatggtggaagaagcggcgcgtcacgctgaggaggcgaagaagaatgccggagaggcggagacatcagcgaggaatgccggcatatcatccagtaaggcggaagcgagcgcggcaaatgctgacacttcagcaggggatgcattggagtcagcccggcaggcggcagaaagtgcagccgctgcaaagcagtcagaggatgcgtcctcgtcctcggcttctgcggccgctcaaaaagccagtgagtcatcacaaagtgcagcagaagctgaattgtcaagaaagacggcagaaagtgcagccggtaatgcagccagggatgcaacgaccgcaacagaaaaagcccgggagtcagcagaaagcgcacagtcagcggaacaaagcaggatagcggcggaagaggccgtaaaccgaatccccaccgtggtgggacctcccgggccaaagggggaacaggggcccgcgggtcctcaggggccgaagggtgataagggagagcgcggtgacaccggccctgtcggggcaaccggcgaacggggaccggcaggtaatgctggtccggcaggcccgcaggggccgaaaggtgacaggggagagcggggagagcggggagagaccggtctgacgggaaatgcaggtccacagggtccaaagggagataccggtgcagcaggcccggcaggcccacagggaccgaaaggagaaacaggtgcggctggcccggtgggggcaaccggacctcaggggccgaagggcgacccgggggagacgcaaatacggttccgtctggggccgggaaacattattgagacaaacagccatggctggttcccggatacagatggcgcactcatcaccggactgacctttcttgaccccaaagatgccacacgggttcaggttttttttcagcatttgcaggtcaggtttggtgacgggccgtggcaggatgttaaggggctggatgaagtgggcagtgatacaggcagaacaggagaatga

SEQ ID NO: 298 - DNA, 1320 bp, Escherichia coli
gtgaatatggcagtaaagatttcaggtgtactgaaagacggcacaggaaaaccggtacagaactgcacaatccagctgaaagcaaaacgtaacagcaccacggtggtggtgaacacgctggcctcagaaaatccggatgaagccgggcgttacagcatggacgttgagtacggtcagtacagcgttattctgttggtggagggattcccgccgtcacatgccgggaccatcaccgtgtatgaagattctcaacccggtacgctgaatgattttctcggtgccatgacggaggatgatgcccgtccggaggcattgcgacgttttgaactgatggtggaagaggtggcgcgtcacgctgaggaggcgaagaagaatgccggagaggcggagacgtcagcgaggaatgccggcatatcagccagtcaggcagaagagagcgctgcaaatgttgacacttcagcaggggaggcatcggagtcagcccggcaggcggcagaaagtgcagcctcagcaaagcagtcagaggatgcgtcctcgtcctcggcttctgcggccgctcaaaaagccagtgagtcatcacaaagtgcagcagaagctgaattgtcaagaaagacggcagaaagtgcagccggtaatgcagccagggatgcaacgaccgcaacagaaaaagcccgggagtcagcagaaagcgcacagtcagcggaacaaagcaggatagcggcggaagaggccgtaaaccgaatccccaccgtggtggggccacccggaccaaagggagaaccggggcccgcgggtcctcaggggccgaagggagataaaggagagcgtggtgacaccggccctgtcggggcaaccggcgaacggggaccgggaggagatacaggtccggcaggtccgcaggggccgaaaggtgacaggggagagcggggagagaccggtctgacgggaaatgcaggtccacagggtccaaagggagataccggtgcggcaggcccggcaggcccacagggaccgaaaggagaaacaggtgcggctggcccggtgggggcaaccggacctcagggaccgaagggcgacccgggggagacacaaatccgttttcgtctggggccgggaaacattattgagacaaacagccatggctggttcccggatacagatggtgcgctcatcaccggactgacctttcttgaccccaaagatgccacacgggttcagggtttttttcagcatttgcaggtcaggtttggtgacgggccgtggcaggatgttaaggggcttgatgaagtgggcagtgatacaggcagaacaggagaatga

SEQ ID NO: 299 - DNA, 1314 bp, Escherichia coli
atggcagtaaagatttcaggtgtactgaaagacggcacaggaaaaccggtagagaactgcaccattcaactgaaagccagacgtaacagcgccacggtggtggtgaacacggtggcctctgaaaatccggatgaagccggtcgttacagcatggacgttgagtacggtcagtacagcgttattctgttggtggaagggttcccgccgtcacatgccgggaccatcaccgtgtatgaagattctcaaccggggacgctgaatgattttctcggtgccatgtcggaggatgacgtccggccggaggcactgcgtcgttttgaactgatggtggaagaagcggcgcgtcacgctgaggaggcgaagaagaatgccggagaggcggagacgtccgcgaggaatgccggcatatcagccagtcaggcagaagagagcgcggcaaatgctgacacttcagcaggggatgcattggagtcagcccggcaggcggcagaaagtgcagccgctgcaaagcagtcagaggatgcgtcctcgtcctcggcttctgcggccgctcaaaaagccagtgagtcatcacaaagtgcagcagaagctgaattgtcaagaaagacggcagaaagtgcagccggtaatgcagccagggatgcaacgaccgcaacagaaaaagcccgggagtcagcagaaagcgcacagtcagcggaacaaagcaggatagcggcggaagaggccgtaaaccgaatccccaccgtggtgggacctcccgggccaaagggggaacaggggcccgcgggtcctcaggggccgaagggtgataagggagagcgcggtgacaccggccctgtcggggcaaccggcgaacggggaccggcaggtgatgctggtccggcaggcccgcaggggccgaaaggtgacaggggagagcggggagagaccggtctgacgggaaatgcaggtccacagggtccaaagggagataccggtgcggcaggcccggcaggcccacagggaccgaaaggagaaacaggtgcggctggcccggtgggggcaaccggacctcagggaccgaagggcgacccgggggagacacaaatccgttttcgtctggggccggcgagcattattgagacaaacagcaatggctggttcccggatacagatggcgcactcatcaccggactgacctttcttgaccccaaagatgccacacaggttcaggggctgtttcggcatttgcaggtcaggtttggtgacgggccgtggcaggatgttaaggggctggatgaagtgggcagtgatacaggcagaacaggagaatga

SEQ ID NO: 300 - DNA, 1314 bp, Escherichia coli; identical to SEQ ID NO: 218

SEQ ID NO: 301 - DNA, 1086 bp, Escherichia coli
gtgtatgaagattctcaacccggtacgctgaatgattttctcggtgccatgtcggaggatgacgtccggccggaggcactgcgtcgttttgaactgatggtggaagaagcggcgcgtcacgctgaggaggcgaagaagaatgccggagaggcggagacgtccgcgaggaatgccggcatatcagccagtcaggcagaagagagcgctgcaaatgctgacacttcagcaggggatgcatcggagtcagcccggcaggcggcagaaagtgcagccgctgcaaagcagtcagaggatgcgtcctcgtcctcggcttctgcggccgctcaaaaagccagtgagtcatcacaaagtgcagcagaagctgaattgtcaagaaagacggcagaaagtgcagccggtaatgcagccagggatgcaacgaccgcaacagaaaaagcccgggagtcagcagaaagcgcacagtcagcggaacaaagcaggatagcggcggaagaggccgtaaaccgaatccccaccgtggtgggacctcccgggccaaagggggaacaggggcccgcgggtcctcaggggccgaagggtgataagggagagcgcggtgacaccggccctgtcggggcaaccggcgaacggggaccggcaggtgatgctggtccggcaggcccgcaggggccgaaaggtgacaggggagagcggggagagaccggtctgacgggaaatgcaggtccacagggtccaaagggagataccggtgcggcaggcccggcaggcccacagggaccgaaaggagaaacaggtgcggctggcccggtgggggcaaccggacctcagggaccgaagggcgacccgggggagacacaaatccgttttcgtctggggccgggaaacattattgagacaaacagcaatggctggttcccggatacagatggcgcactcatcaccggactgacctttcttgcccccaaagatgccacacgggttcagggtttttttcagcatttgcaggtcaggtttggtgacgggccgtggcaggatgttaaggggctggatgaagtgggcagtgatacaggcagaacaggagaatga

SEQ ID NO: 302 - DNA, 1320 bp, Escherichia coli
gtgaatatggcagtaaagatttcaggtgtactgaaagacggcacaggaaaaccggtagagaactgcaccattcaactgaaagccagacgtaacagcgccacggtggtggtgaacacggtggcctctgaaaatccggatgaagccggtcgttacagcatggacgttgagtacggtcagtacagcgttattctgttggtggaagggttcccgccgtcacatgccgggaccatcaccgtgtatgaagattctcaaccggggacgctgaatgattttctcggtgccatgtcggaggatgacgtccggccggaggcactgcgtcgttttgaactgatggtggaagaagcggcgcgtcacgctgaggaggcgaagaagaatgccggagaggcggagacgtccgcgaggaatgccggcatatcagccagtcaggcagaagagagcgcggcaaatgctgacacttcagcaggggatgcatcggagtcagcccggcaggcggcagaaagtgcagccgctgcaaagcagtcagaggaggcgtcctcgtcctcggcttctgcggccgctcaaaaagccagtgagtcatcacaaagtgcagcagaagctgaattgtcaagaaagacggcagaaagtgcagccggtaatgcagccagggatgcaacgaccgcaacagaaaaagcccgggagtcagcagaaagcgcacagtcagcggaacaaagcaggatagcggcggaagaagccgtaaaccgaatccccaccgtggtgggacctcccgggccaaagggggaaccgggtcccgcgggtcctcaggggccgaagggagataaaggagagcgtggcgacaccggcccggcaggggcaaccggcgaacggggaccggcaggtgatgctggtccggcaggcccgcaggggccgaaaggtgacaggggagagcggggagagaccggtctgacgggaaatgcaggtccacagggtccaaagggagacaccggggcagcaggcccggcaggcccacagggaccgaaaggagaaacaggtgcggctggcccggtgggggcaaccggacctcagggaccgaagggcgacccgggggagacacaaatccgttttcgtctggggccggcgagcattattgagacaaacagccatggctggttcccgggtacagatggtgcgctcatcaccggactgacctttcttgcccccaaagatgccacacgggttcaggttttttttcagcatttgcaggtcaggtttggtgacgggccgtggcaggatgttaaggggctggatgaagtgggcagtgatacaggcagaacaggagaatga

SEQ ID NO: 303 - DNA, 1317 bp, Escherichia coli; identical to SEQ ID NO: 217

SEQ ID NO: 304 - DNA, 1323 bp, Escherichia coli
  misc_feature (104)..(104): n is a, c, g, or t
gtgggtatggcagcagtacaaatatcaggcgtgctgaaagatggtgcgggaaaaccaatacagaactgcaccattcaactgaaagccagacgtaacagcaccanggtggtggtgaacacggtggcctctgaaaatccggatgaggcagggcgttacagcatggacgtcgagtatggtcagtacagcgtcactctgttggtggagggattcccgccatcacatgccgggaccatctccgtgtatgaagattctcaaccgggtacgctgaatgattttctcggtgccatgacggaggatgatgcccgtccggaggcactgcgtcgttttgaacagatggtggaagaagcagcgcgtcacgcagaggaggcgaagaagaatgccggagaagcagagacgtccgcgaggaatgccggcatatcagccagtaaggcggaagcgagcgccgcaaatgctgatacttcagcagaggatgcatcggagtcagcccggcaggcggcagaaagtgcagcctctgcaaagaagtcagaggaagcgtcctcgtcctcagcctctgaggccgctcaaaaagccagtgagtcattacaaagtgcaacagatgccgagttgtcaaaaaagacggcagaaagtgcagccggtaatgcagccagggatgcaacgacctcaacagaaaaagcccgggaatcagcagaaagcgcacagtcagcggaacaaagcagaatagcggcggaagacgccgtaaacagaattcccaccgtggtggggcctcccggaccaaagggggaaccgggtcccgcgggtcctcaggggccgaagggagataaaggagagcgtggagacaccggtccggcaggggcaaccggtgaacggggaccgggaggagatacaggtccggcaggtccgcaggggccgaaaggtgacaggggagagcggggagagaccggtctgacgggaaatgcaggtccacagggtccaaagggagacaccggggcagcaggcccggcaggcccacagggaccgaaaggagaaacaggtgcggctggcccggtgggggcaaccggacctcaggggccgaagggcgacccgggggagacacaaatacggttccgtctggggccgatgagaattattgagacaaacagctatggctggttcccgggtacagatggtgcgctcatcaccggactgacctttcttgaccccaaagatgccacacaggttcaggggatgtttcagcatttgcaggtcagatttggtgacgggccatggcaggatgttaagggactggatgaagtgggcagtgatacaggcagaactggagaatga

SEQ ID NO: 305 - DNA, 1320 bp, Escherichia coli
gtgaatatggcagtaaagatttcaggtgtactgaaagacggcacaggaaaaccggtagagaactgcaccattcaactgaaagccagacgtaacagcgccacggtggtggtgaacacggtggcctctgaaaatccggatgaagccggtcgttacagcatggacgttgagtacggtcagtacagcgttattctgttggtggaagggttcccgccgtcacatgccgggaccatcaccgtgtatgaagattctcaaccggggacgctgaatgattttctcggtgccatgtcggaggatgacgtccggccggaggcactgcgtcgttttgaactgatggtggaagaagcggcgcgtcacgctgaggaggcgaagaagaatgccggagaggcggagacgtccgcgaggaatgccggcatatcagccagtcaggcagaagagagcgcggcaaatgctgacacttcagcaggggatgcatcggagtcagcccggcaggcggcagaaagtgcagccgctgcaaagcagtcagaggaggcgtcctcgtcctcggcctctgcggccgctcaaaaagccagtgagtcatcacaaagtgcagcagatgctgagttgtcaaaaaagacggcagaaagtgcagccggtaatgcagccagggatgcaacgaccgcaacagaaaaagcccgggagtcagcagaaagcgcacagtcagcggaacaaagcaggatagcggcggaagaggccgtaaaccgaatccccacggtggtggggcctcccgggccaaagggggaaccgggtcccgcgggtcctcaggggccgaagggtgataagggagagcgcggtgacaccggccctgtcggggcaaccggcgaacggggaccggcaggtgatgctggtccggcaggcccgcaggggccgaaaggtgacaggggagagcggggagagaccggtctgacgggaaatgcaggtccacagggtccaaagggagacaccggggcagcaggcccggcaggcccacagggaccgaaaggagaaacaggtgcggctggcccggtgggggcaaccggacctcagggaccgaagggcgacccgggggagacacaaatccgttttcgtctggggccggcgagcattattgagacaaacagccatggctggttcccgggtacagatggtgcgctcatcaccggactgacctttcttgcccccaaagataccacacgggttcagggtttttttcagcatttgcaggtcaggtttggtgacgggccgtggcaggatgttaaggggctkgatgaagtgggcagtgatacaggcagaacaggagaatga

SEQ ID NO: 306 - DNA, 1320 bp, Escherichia coli
gtgaatatggcagtaaagatttcaggtgtactgaaagacggcacaggaaaaccggtagagaactgcaccattcaactgaaagccagacgkamcagcrscacggtggtggtgaacacggtggcctctgaaaatccggatgaagccggtcgttacagcatggacgttgagtacggtcagtacagcgtyattctgttggtggaagggttcccgccgtcacatgccgggaccatcaccgtgtatgaagattctcaaccggggacgctgaatgattttctcggtgccatgtcggaggatgacgtccggccggaggcactgcgtcgttttgaactgatggtggaagaagcggcgcgtcacgctgaggaggcgaagaagaatgccggagaggcggagacgtccgcgaggaatgccggcatatcagccagtcaggcagaagagagcgcggcaaatgctgacacttcagcaggggatgcatcggagtcagcccggcaggcggcagaaagtgcagccgctgcaaagcagtcagaggakgcgtcctcgtcctcggcttctgcggccgctcaaaaagccagtgagtcatcacaaagtgcagcagaagctgaattgtcaagaaagacggcagaaagtgcagccggtaatgcagccagggatgcaacgaccgcaacagaaaaagcccgggagtcwgcagaaagcgcacagtcagcggaacaaagcaggatagcggcggaagaggccgtaaaccgaatccccaccgtggtgggacctcccgggccaaagggggaacaggggcccgcgggtcctcaggggccgaagggtgataagggagagcgcggtgacaccggccctgtcggggcaaccggcgaacggggaccggcaggtgatgctggtccggcaggcccgcaggggccgaaaggtgacaggggagagcggggagagaccggtctgacgggaaatgcaggtccacagggtccaaagggagataccggtgcggcaggcccggcaggcccacagggaccgaaaggagaaacaggtgcggctggcccggtgggggcaaccggacctcagggaccgaagggcgacccgggggagacacaaatccgttttcgtctggggccgggaaacattattgagacaaacagcaatggctggttcccggatacagatggcgcactcatcaccggactgacctttcttgcccccaaagatgccacacgggttcagggtttttttcagcatttgcaggtcaggtttggtgacgggccgtggcaggatgttaaggggctggatgaagtgggcagtgatacaggcagaacaggagaatga

SEQ ID NO: 307 - DNA, 1314 bp, Escherichia coli; identical to SEQ ID NO: 219

SEQ ID NO: 308 - DNA, 1224 bp, Escherichia coli; identical to SEQ ID NO: 174

SEQ ID NO: 309 - DNA, 1320 bp, Escherichia coli
gtgaatatggcagtaaagatttcaggtgtactgaaagacggcacaggaaaaccggtagagaactgcaccattcaactgaaagccagacgtamcagcgccacggtggtggtgaacacggtggcctctgaaaatccggatgaagccggtcgttacagcatggacgttgagtacggtcagtacagcgttattctgttggtggaagggttcccgccgtcacatgccgggaccatcaccgtgtatgaagattctcaaccggggacgctgaatgattttctcggtgccatgtcggaggatgacgtccggccggaggcactgcgtcgttttgaactgatggtggaagaagcggcgcgtcacgctgaggaggcgaagaagaatgccggagaggcggagacgtccgcgaggaatgccggcatatcagccagtcaggcagaagagagcgcggcaaatgctgacacttcagcaggggatgcatyggagtcagcccggcaggcggcagaaagtgcagccgctgcaaagcagtcagaggakgcgtcctcgtcctcggcttctgcggccgctcaaaaagccagtgagtcatcacaaagtgcagcagaagctgaattgtcaagaaagacggcagaaagtgcagccggtaatgcagccagggatgcaacgaccgcaacagaaaaagcccgggagtcwgcagaaagcgcacagtcagcggaacaaagcaggatagcggcggaagargccgtaaaccgaatccccaccgtggtgggrcctcccgggccaaagggggaacmgggkcccgcgggtcctcaggggccgaagggagataaaggagagcgygghgacaccggccckgymggggcaaccggcgaacggggaccggcaggtgatgctggtccggcaggcccgcaggggccgaaaggtgacaggggagagcggggagagaccggtctgacgggaaatgcaggtccacagggtccaaagggagacaccggkgcrgcaggcccggcaggcccacagggaccgaaaggagaaacaggtgcggctggcccggtgggggcaaccggacctcagggaccgaagggcgacccgggggagacacaaatccgttttcgtctggggccggcgagcattattgagacaaacagcmatggctggttcccggrtacagatggygcgctcatcaccggactgacctttcttgmccccaaagatrccacacgggttcagggtttttttcagcatttgcaggtcaggtttggtgacgggccgtggcaggatgttaaggggctkgatgaagtgggcagtgatacaggcagaacaggagaatga

SEQ ID NO: 310 - DNA, 1314 bp, Escherichia coli; identical to SEQ ID NO: 299

SEQ ID NO: 311 - DNA, 1398 bp, Escherichia coli
atgggcagcagccatcatcatcatcatcacagcagcggcctggtgccgcgcggcagccatatggcagtaaagatttcaggtgtactgaaagacggcacaggaaaaccggtagagaactgcaccattcaactgaaagccagacgtaacagcgccacggtggtggtgaacacggtggcctctgaaaatccggatgaagccggtcgttacagcatggacgttgagtacggtcagtacagcgttattctgttggtggaagggttcccgccgtcacatgccgggaccatcaccgtgtatgaagattctcaaccggggacgctgaatgattttctcggtgccatgtcggaggatgacgtccggccggaggcactgcgtcgttttgaactgatggtggaagaagcggcgcgtcacgctgaggaggcgaagaagaatgccggagaggcggagacgtccgcgaggaatgccggcatatcagccagtcaggcagaagagagcgcggcaaatgctgacacttcagcaggggatgcatcggagtcagcccggcaggcggcagaaagtgcagccgctgcaaagcagtcagaggaggcgtcctcgtcctcggcctctgcggccgctcaaaaagccagtgagtcatcacaaagtgcagcagatgctgagttgtcaaaaaagacggcagaaagtgcagccggtaatgcagccagggatgcaacgaccgcaacagaaaaagcccgggagtcagcagaaagcgcacagtcagcggaacaaagcaggatagcggcggaagaggccgtaaaccgaatccccaccgtggtgggacctcccgggccaaagggggaacaggggcccgcgggtcctcaggggccgaagggtgataagggagagcgcggtgacaccggccctgtcggggcaaccggcgaacggggaccggcaggtgatgctggtccggcaggcccgcaggggccgaaaggtgacaggggagagcggggagagaccggtctgacgggaaatgcaggtccacagggtccaaagggagataccggtgcggcaggcccggcaggcccacagggaccgaaaggagaaacaggtgcggctggcccggtgggggcaaccggacctcagggaccgaagggcgacccgggggagacacaaatccgttttcgtctggggccggcgagcattattgagacaaacagcaatggctggttcccggatacagatggcgcactcatcaccggactgacctttcttgcccccaaagatgccacacgggttcagggtttttttcagcatttgcaggtcaggtttggtgacgggccgtggcaggatgttaaggggctggatgaagtgggcagtgatacaggcagaacaggagaactcgagcaccaccaccaccaccactga

SEQ ID NO: 312 - DNA, 1938 bp, Escherichia coli
gtgagtgttgttgtttcggggacgctgaaatctcctgatggtgaggcgatatcaggagcaaatattaccctgacggcgctgacagtttcaccggatgcgctcagcggcaccagtgcgtcggcagtgacccgtgaaggtggatattacggaatgacgatggatccgggggagtatgcggtttcggtgacggtgaaagggaagactgttgtctacggacgtgtgcgtattgaggggaccgaaagtacggtgacgctcaatatgctgttacgccgcagtcttgttgaggttagcatacccggagaactgctgacagatttccggcagatacagaataatgtggctgatgaccttgccactattcgtcgcctgaatgaagacacggcgacaaaaaacactcaggccacacagtcaaaagaaagtgcagcagccagtgcgaagagtgcatctgacagtgcaaagacggcaaccagcagggcggctgaagccggacaaaaagcgactgatgccactgaggctgcgacccgtgcagtcacagcagcggggaatgcagaggaaagctcgacccgtgccggagagtctgaaaaagccgccggagctgatgcagaaaaagccagacagcatgctgaaaaggccaggctggcgcaggagagcgccggagagatccttaagcgggcagaggctgccactgtcagtgctgaagaggccagacgtatggctgagaatgcacgggggccccgggggcctcagggagaaactggtccgaagggggatgtcggtcctaaaggcgaaacaggtccagtgggccctcaagggcccgcagggccgaaaggtgagcgtggtgacgttggtgctcagggggctgtagggcctgctggtccgcgtggtgagaagggcgaacagggggagcgaggaccgcagggaataccaggcctgaagggggataccggagagcgggggcctaaaggggaccagggggatatggggccaaaaggcgagaaaggtgatccgggaggtcctgcaggcccgcaaggtcctaaaggcgaacgaggagaagccggaccacagggaccgatgggagcacgaggtgagcgtggggagactggcccccgaggtgaacctggtcctgcaggtccgagaggcgaacgaggagagaccggacctcagggacctcgtggagagccaggtccggcaggcagcgctgcaaatgtggctgatgcaacgacggcacagaagggaattgtgcagttaagcagcgcaacggacagtgatgatgaaacgaaggctgccaccccgaaagcggtgaaagcggcaatggatgtggcaaatgaagcgaaaacaaaggcagaagaggctgcagcaggaggtggtgttcccggtccgaaaggagataaaggggacacggggccagcaggtccggctgggccgaagggtgataagggagagcgcggtgacaccggccctgtcggggcaaccggcgaacggggaccggcaggtgatgctggtccggcaggcccgcaggggccgaaaggtgacaggggagagcggggagagaccggtctgacgggaaatgcaggtccacagggtccaaagggagataccggtgcggcaggcccggcaggcccacagggaccgaaaggagaaacaggtgcggcaggcccggtgggggcgaccggacctcaggggccgaagggcgacccgggggagacgcaaatacggttccgtctggggccgggaaacattattgagacaaacagccatggctggttcccggatacagatggcgcactcatcaccggactgacctttcttgaccccaaagatgccacacgggttcagggtttttttcagcatttgcaggtcaggtttggtgacgggccgtggcaggatgtcaaggggctggatgaagtgggcagtgatacaggcagaacaggagaatga

SEQ ID NO: 313 - DNA, 1938 bp, Escherichia coli; identical to SEQ ID NO: 312

SEQ ID NO: 314 - DNA, 1938 bp, Escherichia coli; identical to SEQ ID NO: 312

SEQ ID NO: 315 - DNA, 1938 bp, Escherichia coli; identical to SEQ ID NO: 312

SEQ ID NO: 316 - DNA, 1938 bp, Escherichia coli; identical to SEQ ID NO: 312

SEQ ID NO: 317 - DNA, 1938 bp, Escherichia coli
gtgagtgttgttgtttcggggacgctgaaatctcctgatggtgaggcgatatcaggagcaaatattaccctgacggcgctgacagtttcaccggatgcgctcagcggcaccagtgcgtcggcagtgacccgtgaaggtggatattacggaatgacgatggatccgggggagtatgcggtttcggtgacggtgaaagggaagactgctgtctacggacgtgtgcgtattgaggggaccgaaagtacggtgacgctcaatatgctgttacgccgcagtcttgttgaggttagcatacccggagaactgctgacagatttccggcagatacagaataatgtggctgatgaccttgccactattcgtcgcctgaatgaagacacggcgacaaaaaacactcaggccacacagtcaaaagaaagtgcagcagccagtgcgaagagtgcatctgacagtgcaaagacggcaaccagcagggcggctgaagccggacaaaaagcgactgatgccactgaggctgcgacccgtgcagtcacagcagcggggaatgcagaggaaagctcgacccgtgccggagagtctgaaaaagccgccggagctgatgcagaaaaagccagacagcatgctgaaaaggccaggctggcgcaggagagcgccggagagatccttaagcgggcagaggctgccactgtcagtgctgaagaggccagacgtatggctgagaatgcacgggggccccgggggcctcagggagaaactggtccgaagggggatgtcggtcctaaaggcgaaacaggtccagtgggccctcaagggcccgcagggccgaaaggtgagcgtggtgacgttggtgctcagggggctgtagggcctgctggtccgcgtggtgagaagggcgaacagggggagcgaggaccgcagggaataccaggcctgaagggggataccggagagcgggggcctaaaggggaccagggggatatggggccaaaaggcgagaaaggtgatccgggaggtcctgcaggcccgcaaggtcctaaaggcgaacgaggagaagccggaccacagggaccgatgggagcacgaggtgagcgtggggagactggcccccgaggtgaacctggtcctgcaggtccgagaggcgaacgaggagagaccggacctcagggacctcgtggagagccaggtccggcaggcagcgctgcaaatgtggctgatgcaacgacggcacagaagggaattgtgcagttaagcagcgcaacggacagtgatgatgaaacgaaggctgccaccccgaaagcggtgaaagcggcaatggatgtggcaaatgaagcgaaaacaaaggcagaagaggctgcagcaggaggtggtgttcccggtccgaaaggagataaaggggacacggggccagcaggtccggctgggccgaagggtgataagggagagcgcggtgacaccggccctgtcggggcaaccggcgaacggggaccggcaggtgatgctggtccggcaggcccgcaggggccgaaaggtgacaggggagagcggggagagaccggtctgacgggaaatgcaggtccacagggtccaaagggagataccggtgcggcaggcccggcaggcccacagggaccgaaaggagaaacaggtgcggcaggcccggtgggggcgaccggacctcaggggccgaagggcgacccgggggagacgcaaatacggttccgtctggggccgggaaacattattgagacaaacagccatggctggttcccggatacagatggcgcactcatcaccggactgacctttcttgaccccaaagatgccacacgggttcagggtttttttcagcatttgcaggtcaggtttggtgacgggccgtggcaggatgtcaaggggctggatgaagtgggcagtgatacaggcagaacaggagaatga

SEQ ID NO: 318 - DNA, 1938 bp, Escherichia coli; identical to SEQ ID NO: 317

SEQ ID NO: 319 - DNA, 1938 bp, Escherichia coli; identical to SEQ ID NO: 312

SEQ ID NO: 320 - DNA, 1938 bp, Escherichia coli; identical to SEQ ID NO: 317

SEQ ID NO: 321 - DNA, 1938 bp, Escherichia coli; identical to SEQ ID NO: 312

SEQ ID NO: 322 - DNA, 1938 bp, Escherichia coli
gtgagtgttgttgtttcggggacgctgaaatctcctgatggtgaggcgatatcaggagcaaatattaccctgacggcgctgacagtttcaccggatgcgctcagcggcaccagtgcgtcggcagtgacccgtgaaggtggatattacggaatgacgatggatccgggggagtatgcggtttcggtgacggtgaaagggaagactgctgtctacggacgtgtgcgtattgaggggaccgaaagtacggtgacgctcaatatgctgttacgccgcagtcttgttgaggttagcatacccggagaactgctgacagatttccggcagatacagaataatgtggctgatgaccttgccactattcgtcgcctgaatgaagacacggcgacaaaaaacgctcaggccacacagtcaaaagaaagtgcagcagccagtgcgaagagcgcatctgacagtgcaaagacggcaaccagcagggcggctgaagccggacaaaaagcgactgatgccactgaggctgcgacccgtgcagtcacagcagcggggaatgcagaggaaagctcgacccgtgccggagagtctgaaaaagccgccggagctgatgcagaaaaagccagacagcatgctgaaaaggccaggctggcgcaggagagcgccggagagatccttaagcgggcagaggctgccactgtcagtgctgaagaggccagacgtatggctgagaatgcacgggggccccgggggcctcagggagaaactggtccgaagggggatgtcggtcctaaaggcgaaacaggtccagtgggccctcaagggcccgcagggccgaaaggtgagcgtggtgacgttggtgctcagggggctgtagggcccgctggtccgcgtggtgagaagggcgaacagggggagcgaggaccgcagggaataccaggcctgaagggggataccggagagcgggggcctaaaggggaccagggggatatggggccaaaaggcgagaaaggtgatccgggaggtcctgcaggcccgcaaggtcctaaaggcgaacgaggagaagccggaccacagggaccgatgggagcacgaggtgagcgtggggagactggcccccgaggtgaacctggtcctgcaggtccgagaggcgaacgaggagagaccggacctcagggacctcgtggagagccaggtccggcaggcagcgctgcaaatgtggctgatgcaacgacggcacagaagggaattgtgcagttaagcagcgcaacggacagtgatgatgaaacgaaggctgccaccccgaaagcggtgaaagcggcaatggatgtggcaaatgaagcgaaaacaaaggcagaagaggctgcagcaggaggtggtgttcccggtccgaaaggagataaaggggacacggggccagcaggtccggctgggccgaagggtgataagggagagcgcggtgacaccggccctgtcggggcaaccggcgaacggggaccggcaggtgatgctggtccggcaggcccgcaggggccgaaaggtgacaggggagagcggggagagaccggtctgacgggaaatgcaggtccacagggtccaaagggagataccggtgcggcaggcccggcaggcccacagggaccgaaaggagaaacaggtgcggctggcccggtaggggcaaccggacctcaggggccgaagggcgacccgggggagacgcaaatacggttccgtatggggccgggaaacattattgagacaaacagcaatggctggttcccggatacagatggcgcactcatcaccggactgacctttcttgaccccaaagatgccacacgggttcagggtttttttcagcatttgcaggtcaggtttggtgacgggccgtggcaggatgtcaaggggctggatgaagtgggcagtgatacaggcagaacaggagaatga

SEQ ID NO: 323 - DNA, 1938 bp, Escherichia coli; identical to SEQ ID NO: 317

SEQ ID NO: 324 - DNA, 1938 bp, Escherichia coli; identical to SEQ ID NO: 317

SEQ ID NO: 325 - DNA, 1938 bp, Escherichia coli; identical to SEQ ID NO: 317

SEQ ID NO: 326 - DNA, 1938 bp, Escherichia coli; identical to SEQ ID NO: 317

SEQ ID NO: 327 - DNA, 2037 bp, Escherichia coli
gtgagtgttgttgtttcggggacgctgaaatctcctgatggtgaggcgatatcaggagcaaatattaccctgacggcgctgacagtttcaccggatgcgctcagcggcaccagtgcgtcggcagtgacccgtgaaggtggatattacggaatgacgatggatccgggggagtatgcggtttcggtgacggtgaaagggaagactgctgtctacggacgtgtgcgtattgaggggaccgaaagtacggtgacgctcaatatgctgttacgccgcagtcttgttgaggttagcatacccggagaactgctgacagatttccggcagatacagaataatgtggctgatgaccttgccactattcgtcgcctgaatgaagacacggcgacaaaaaacactcaggccacacagtcaaaagaaagtgcagcagccagtgcgaagagtgcatctgacagtgcaaagacggcaaccagcagggcggctgaagccggacaaaaagcgactgatgccactgaggctgcgacccgtgcagtcacagcagcggggaatgcagaggaaagctcgacccgtgccggagagtctgaaaaagccgccggagctgatgcagaaaaagccagacagcatgctgaaaaggccaggctggcgcaggagagcgccggagagatccttaagcgggcagaggctgccactgtcagtgctgaagaggccagacgtatggctgagaatgcacgggggccccgggggcctcagggagaaactggtccgaagggggatgtcggtcctaaaggcgaaacaggtccagtgggccctcaagggcccgcagggccgaaaggtgagcgtggtgacgttggtgctcagggggctgtagggcctgctggtccgcgtggtgagaagggcgaacagggggagcgaggaccgcagggaataccaggcctgaagggggataccggagagcgggggcctaaaggggaccagggggatatggggccaaaaggcgagaaaggtgatccgggaggtcctgcaggcccgcaaggtcctaaaggcgaacgaggagaagccggaccacagggaccgatgggagcacgaggtgagcgtggggatactggcccccgaggtgaacctggtcctgcaggtccgagaggcgaacgaggagagaccggacctcagggaccgatgggagcacgaggtgagcgtggggagactggcccccgaggtgaacctggtcctgcaggtccgagaggcgaacgaggagagaccggacctcagggacctcgtggagagccaggtccggcaggcagcgctgcaaatgtggctgatgcaacgacggcacagaagggaattgtgcagttaagcagcgcaacggacagtgatgatgaaacgaaggctgccaccccgaaagcggtgaaagcggcaatggatgtggcaaatgaagcgaaaacaaaggcagaagaggctgcagcaggaggtggtgttcccggtccgaaaggagataaaggggacacggggccagcaggtccggctgggccgaagggtgataagggagagcgcggtgacaccggccctgtcggggcaaccggcgaacggggaccggcaggtgatgctggtccggcaggcccgcaggggccgaaaggtgacaggggagagcggggagagaccggtctgacgggaaatgcaggtccacagggtccaaagggagataccggtgcggcaggcccggcaggcccacagggaccgaaaggagaaacaggtgcggcaggcccggtgggggcgaccggacctcaggggccgaagggcgacccgggggagacgcaaatacggttccgtctggggccgggaaacattattgagacaaacagccatggctggttcccggatacagatggcgcactcatcaccggactgacctttcttgaccccaaagatgccacacgggttcagggtttttttcagcatttgcaggtcaggtttggtgacgggccgtggcaggatgtcaaggggctggatgaagtgggcagtgatacaggcagaacaggagaatga

SEQ ID NO: 328 - DNA, 1938 bp, Escherichia coli; identical to SEQ ID NO: 317

SEQ ID NO: 329 - DNA, 1938 bp, Escherichia coli
gtgagtgttgttgtttcggggacgctgaaatctcctgatggtgaggcgatatcaggagcaaatattaccctgacggcgctgacagtttcaccggatgcgctcagcggcaccagtgcgtcggcagtgacccgtgaaggtggatattacggaatgacgatggatccgggggagtatgcggtttcggtgacggtgaaagggaagactgctgtctacggacgtgtgcgtattgaggggaccgaaagtacggtgacgctcaatatgctgttacgccgcagtcttgttgaggttagcatacccggagaactgctgacagatttccggcagatacagaataatgtggctgatgaccttgccactattcgtcgcctgaatgaagacacggcgacaaaaaacactcaggccacacagtcaaaagaaagtgcagcagccagtgcgaagagtgcatctgacagtgcaaagacggcaaccagcagggcggctgaagccggacaaaaagcgactgatgccactgaggctgcgacccgtgcagtcacagcagcggggaatgcagaggaaagctcgacccgtgccggagagtctgaaaaagccgccggagctgatgcagaaaaagccagacagcatgctgaaaaggccaggctggcgcaggagagcgccggagagatccttaagcgggcagaggctgccactgtcagtgctgaagaggccagacgtatggctgagaatgcacgggggccccgggggcctcagggagaaactggtccgaagggggatgtcggtcctaaaggcgaaacaggtccagtgggccctcaagggcccgcagggccgaaaggtgagcgtggtgacgttggtgctcagggggctgtagggcctgctggtccgcgtggtgagaagggcgaacagggggagcgaggaccgcagggaataccaggcctgaagggggataccggagagcgggggcctaaaggggaccagggggatatggggccaaaaggcgagaaaggtgatccgggaggtcctgcaggcccgcaaggtcctaaaggcgaacgaggagaagccggaccacagggaccgatgggagcacgaggtgagcgtggggagactggcccccgaggtgaacctggtcctgcaggtccgagaggcgaacgaggagagaccggacctcagggacctcgtggagagccaggtccggcaggcagcgctgcaaatgtggctgatgcaacgacggcacagaagggaattgtgcagttaagcagcgcaacggacagtgatgatgaaacgaaggctgccaccccgaaagcggtgaaagcggcaatggatgtggcaaatgaagcgaaaacaaaggcagaagaggctgcagcaggaggtggtgttcccggtccgaaaggagataaaggggacacggggccagcaggtccggctgggccgaagggtgataagggagagcgcggtgacaccggccctgtcggggcaaccggcgaacggggaccggcaggtgatgctggtccggcaggcccgcaggggccgaaaggtgacaggggagagcggggagagaccggtctgacgggaaatgcaggtccacagggtccaaagggaaataccggtgcggcaggcccggcaggcccacagggaccgaaaggagaaacaggtgcggcaggcccggtgggggcgaccggacctcaggggccgaagggcgacccgggggagacgcaaatacggttccgtctggggccgggaaacattattgagacaaacagccatggctggttcccggatacagatggcgcactcatcaccggactgacctttcttgaccccaaagatgccacacgggttcagggtttttttcagcatttgcaggtcaggtttggtgacgggccgtggcaggatgtcaaggggctggatgaagtgggcagtgatacaggcagaacaggagaatga

SEQ ID NO: 330 - DNA, 1938 bp, Escherichia coli; identical to SEQ ID NO: 317

SEQ ID NO: 331 - DNA, 1788 bp, Escherichia coli
atgacgatggatccgggggagtatgcggtttcggtgacggtgaaagggaagactgctgtctacggacgtgtgcgtattgaggggaccgaaagtacggtgacgctcaatatgctgttacgccgcagtcttgttgaggttagcatacccggagaactgctgacagatttccggcagatacagaataatgtggctgatgaccttgccactattcgtcgcctgaatgaagacacggcgacaaaaaacactcaggccacacagtcaaaagaaagtgcagcagccagtgcgaagagtgcatctgacagtgcaaagacggcaaccagcagggcggctgaagccggacaaaaagcgactgatgccactgaggctgcgacccgtgcagtcacagcagcggggaatgcagaggaaagctcgacccgtgccggagagtctgaaaaagccgccggagctgatgcagaaaaagccagacagcatgctgaaaaggccaggctggcgcaggagagcgccggagagatccttaagcgggcagaggctgccactgtcagtgctgaagaggccagacgtatggctgagaatgcacgggggccccgggggcctcagggagaaactggtccgaagggggatgtcggtcctaaaggcgaaacaggtccagtgggccctcaagggcccgcagggccgaaaggtgagcgtggtgacgttggtgctcagggggctgtagggcctgctggtccgcgtggtgagaagggcgaacagggggagcgaggaccgcagggaataccaggcctgaagggggataccggagagcgggggcctaaaggggaccagggggatatggggccaaaaggcgagaaaggtgatccgggaggtcctgcaggcccgcaaggtcctaaaggcgaacgaggagaagccggaccacagggaccgatgggagcacgaggtgagcgtggggagactggcccccgaggtgaacctggtcctgcaggtccgagaggcgaacgaggagagaccggacctcagggacctcgtggagagccaggtccggcaggcagcgctgcaaatgtggctgatgcaacgacggcacagaagggaattgtgcagttaagcagcgcaacggacagtgatgatgaaacgaaggctgccaccccgaaagcggtgaaagcggcaatggatgtggcaaatgaagcgaaaacaaaggcagaagaggctgcagcaggaggtggtgttcccggtccgaaaggagataaaggggacacggggccagcaggtccggctgggccgaagggtgataagggagagcgcggtgacaccggccctgtcggggcaaccggcgaacggggaccggcaggtgatgctggtccggcaggcccgcaggggccgaaaggtgacaggggagagcggggagagaccggtctgacgggaaatgcaggtccacagggtccaaaaggagataccggtgcggcaggcccggcaggtccacagggtccgaaaggagaaacaggtgcggcaggcccggtgggggcgaccggacctcaggggccgaagggcgacccgggggagacgcaaatacggttccgtctggggccgggaaacattattgagacaaacagccatggctggttcccggatacagatggcgcactcatcaccggactgacctttcttgaccccaaagatgccacacgggttcagggtttttttcagcatttgcaggtcaggtttggtgacgggccgtggcaggatgtcaaggggctggatgaagtgggcagtgatacaggcagaacaggagaatga

SEQ ID NO: 332 - DNA, 1701 bp, Escherichia coli
gtgagtgttgttgtttcggggacgctgaaatctcctgatggtgaggcgatatcaggcgcaaatattaccctgacggcgctgacagtttcaccggatgcgctcagcggcaccagtgcgtcagcagtgactcgtgacggcgggtattacggaatgacgctggagccgggggagtatgcggtttctgtgacggtgaaagggaagactgctgtctacggacgtgtgcgtattgaggggactgaaagtacggtgacgctcaatatgctgttacggcgtagtcttgttgaggtgagcatacccggagaactgctgacagatttccggcagatacagaacaatgtggcggatgaccttgccacgattcgtcgtctgaacgaagacacggcggtgaaaaataatcaggcttcacagtcgaaggaaagcgctgctgccagtgcgaagactgcatcagaaagcgcgaaggctgcgacaagcaaagcgacggagtctgcacaaaaagccagtgaggctgcagaggcggcgacccgggcaggtgagtctgaaaaggcagcggcagcagacgcgaaagaggccagacaacatgctgaaaccgccagagtggctcaggaggccgccggagacgttcttaaacgtgctgaggctgctacggttagtgctgaagaagccagacgtatggctgagaatgcacgaggacctaaaggcgatacagggccgaaaggtgatgctggtcctcgtggtgaaacaggtccggcgggtccgcgtggggagaaaggtgagcagggagagcgcggacctcagggacctcgtggggagccaggcccggcgggcagcgcagcaaatgtggcagatgcgacgacggcacagaagggaattgtgcagttaagcagcgcaacggacagtgatgatgaaacgaaggcagccacaccgaaagctgtgaaggcggcaatggatgaggccagggcagcgaaacagaaggcagaagaggttgcgacaacccgcccgtcgggagaaagcatacctggaccgaaaggtgacaggggcgagcaaggaccggcaggtcccacaggtccgaaaggtgagcgcggtgaacccggacctcaggggcctgcaggacagaaaggtgagcagggcctccgtgggctgcagggggcgacaggacctgcgggagcagtggggcccgcaggcccacagggaccggctggtgcagctggtcccaaaggtgatgcaggcccggcagggccacgaggtgaaaggggaccagcgggggcacagggtgttccggggccggttggtccggcaggtcctgcgggtaaaacggggccacgaggtttgcagggagaaacaggaagacagggcccgacaggtccacagggaccgacaggtgaaaccggaccacagggaccacaagggccaaccggaaggctggtacccggggaaatttacagcatcggaacatacattattgccgcactaggcccgtatataaccgacatcggcagaacctatcagccaggagaaactgtatcgggttcacgccttaagcgatgcgccctaatcaaagacgaaaacggaaactatatgaaagctaacaccgatggcattgacggcaacctatcctcagttccgggctcatggatggtgtgtaatgaaattacgtcgacaaatgacaatgaaggcatcgggctgttccagcgcgcatactga

SEQ ID NO: 333 - DNA, 1554 bp, Escherichia coli
atgacagtcagaatatcgggcgtgctgaaggacggcaccgggaagccggtgccgggatgcaccatagagctgaaagcgcgacgcaccacagagacagtgatagtcaccacggtggcgcaggggcagccgggggaaaccggcagttacagttttgatgtggagccggggtggtaccgggtgacgctgaacacggaagggtacgccccgtcgtatgtgggtgacattctggtgaaggcggattctgagccgggaacgctgaataaatttctgatggaacaggatgaggcgcagtattacccgaaagcgcttgcagagctggaagcggtggcagcggaaatcctgaagcgtgctgaagcgtcggcggcgagtgcagaggaagcgaagaaacgggcagagaatgcccggggaccggcgggcgagaagggggacacaggtccacagggtgccacaggggcacagggaccagccggggcaacgggggcggtcggaccaaaaggtgagccggggccaaagggagaacggggagaaacaggtccacagggaccgaagggcgataaaggtgacccgggcggaccgccggggccgaaaggtgacaccggcccacgtggagaggccggaccacccggaccacagggtccggcagggcaaaccggcccgaaaggggataaaggtgaacccggcgcaacaggtccggcaggtcccgcaggccctcggggagaaaccggccccgcaggtcctgcgggtcccgcaggcagtgtcgccagtgttccggatgccagcacatcacagaaaggtgttgtacagctgagcagcgataccaacagcgatgatgaaacaaaagcggcaaccccaaaggctgtgaaagcggtaatggcagaagtgcaggcagcaaaaacgaaggcagaagaggcagcaacccgggcagcagtccccggaccgaagggggacaggggggaacctggcgcacctggtgcagtgggtcccgcaggcccacggggaccggctggtgcagctggtcccaaaggtgatgcaggcccggcaggccccgcaggaaaggatggtaccgccggagcggaaggtaaggcaggtccggcagggccacgaggtgaaaggggaccagcgggggcacagggtgttccggggccggttggtccggcaggtcctgcgggtaaaacggggccacgaggtttgcagggagaaacaggaagacagggcccgacaggtccacagggcccgacaggtgaacccggaccacaggggccaaccggaaggctggtacccggggaaatttacagcatcggaacatacattattgccgcactaggcccgtatataaccgacatcggcagaacctatcagccaggagaaactgtatcgggttcacgccttaagcgatgcgccctaatcaaagacgaaaacggaaactatatgaaagctaacaccgatggcattgacggcaacctatcctcagttccggggtcatggatggtgtgtaatgaaattacgtcgacaaatgacaatgaaggcatcgggctgttccagcgcgcatactga

SEQ ID NO: 334 - DNA, 1482 bp, Escherichia coli
atgacagtcagaatatcgggcgtgctgaaggacggcaccgggaagccggtgccgggatgcaccatagagctgaaagcgcgacgcaccacagagacagtgatagtcaccacggtggcgcaggggcagccgggggaaaccggcagttacagttttgatgtggagccggggtggtaccgggtgacgctgaacacggaagggtacgccccgtcgtatgtgggtgacattctggtgaaggcggattctgagccgggaacgctgaataaatttctgatggaacaggatgaggcgcagtattacccgaaagcgcttgcagagctggaagcggtggcagcggaaatcctgaagcgtgctgaagcgtcggcggcgagtgcagaggaagcgaagaaacgggcagagaatgcccggggaccggcgggcgagaagggggacacaggtccacagggtgccacagggccacagggaccagccggggcaacgggggcggtcggaccaaaaggtgagccggggccaaagggagaacggggagaaacaggtccacagggaccgaagggcgataaaggtgacccgggcggaccgccggggccgaaaggtgacaccggcccacgtggagaggccggaccacccggaccacccggaccacagggtccggcagggcaaaccggcccgaaaggggataaaggtgaacccggcgcaacaggtcctgcgggtcccgcaggcagtgtcgccagtgttccggatgccagcacatcacagaaaggtgttgtacagctgagcagcgataccaacagcgatgatgaaacaaaagcggcaaccccaaaggctgtgaaagcggtaatggcagaagtgcaggcagcaaaaacgaaggcagaagaggcagcaacccgggcagcagtccccggaccgaagggggacaggggggaacctggcgcacctggtgcagtggggcccgcaggcccacggggaccggctggtgcagctggtcccaaaggtgatgcaggccccgcaggaaaggatggtaccgccggagcggaaggtaaggcaggtccggcagggccacgaggtgaaaggggaccagcgggggcgcagggtgttccggggccacggggccctgccggagggcgagggccgatgggaccgcccgggttggatggtaaaaccggaccacagggaccacagggaccacaagggccaaccggaaggctggtacccggggaaatttacagcatcggaacatacattattgccgcactaggcccgtatataaccgacatcggcagaacctatcagccaggagaaactgtatcgggttcacgccttaagcgatgcgccctaatcaaagacgaaaacggaaactatatgaaagctaacaccgatggcattgacggcaacctatcctcagttccggggtcatggatggtgtgtaatgaaattacgtcgacaaatgacaatgaaggcatcgggctgttccagcgcgcatactga

SEQ ID NO: 335 - DNA, 1563 bp, Escherichia coli
atgacagtcagaatatcgggcgtgctgaaggacggcaccgggaagccggtgccgggatgcaccatagagctgaaagcgcgacgcaccacagagacagtgatagtcaccacggtggcgcaggggcagccgggggaaaccggcagttacagttttgatgtggagccggggtggtaccgggtgacgctgaacacggaagggtacgctccgtcgtatgtgggtgacattctggtgaaggcggattctgagccgggaacgctgaataaatttctgatggaacaggatgaggcgcagtattacccgaaagcgcttgcagagctggaagcggtggcagcggaaatcctgaagcgtgctgaagcgtcggcggcgagtgcagaggaagcgaagaaacgggcagagaatgcccggggaccggcgggcgagaagggggacacaggtccacagggtgccacaggggcacagggaccagccggggcaacgggggcggtcggaccaaaaggtgagccggggccaaagggagaacggggagaaacaggtccacagggaccgaagggcgataaaggtgacccgggcggaccgccggggccgaaaggtgacaccggcccacgtggagaggccggaccacccggaccacagggtccggcagggcaaaccggcccgaaaggggataaaggtgaacccggcgcaacaggtccggcaggtcccgcaggccctcggggagaaaccggccccgcaggtcctgcgggtcccgcaggcagtgtcgccagtgttccggatgccagcacatcacagaaaggtgttgtacagctgagcagcgataccaacagcgatgatgaaacaaaagcggcaaccccaaaggctgtgaaagcggtaatggcagaagtgcaggcagcaaaaacgaaggcagaagaggcagcaacccgggcagcagtccccggaccgaagggggacaggggggaacctggcgcacctggtgcagtggggcccgcaggcccacggggaccggctggtgcagctggtcccaaaggtgatgcaggcccggcaggccccgcaggaaaggatggtaccgccggagcggaaggtaaggcaggtccggcagggccacgaggtgaaaggggaccagcgggggcacagggtgttccggggccggttggtccggcaggtcctgcgggtaaaacggggccacgaggtttgcagggagaaacaggaagacagggcccgacaggtccacagggaccgacaggtgaaaccggaccacagggaccacaagggccaaccggaaggctggtacccggggaaatttacagcatcggaacatacattattgccgcactaggcccgtatataaccgacatcggcagaacctatcagccaggagaaactgtatcgggttcacgccttaagcgatgcgccctaatcaaagacgaaaacggaaactatatgaaagctaacaccgatggcattgacggcatactatcctcagttccgggctcatggatggtgtgtaatgaaattacgtcgacaaatgataatgaaagcatcgggctgttccagcgcgcatactga

SEQ ID NO: 336 - DNA, 1509 bp, Escherichia coli
atgacagtcagaatatcgggcgtgctgaaggacggcaccgggaagccggtgccgggatgcaccatagagctgaaagcgcgacgcaccacagagacagtgatagtcaccacggtggcgcaggggcagccgggggaaaccggcagttacagttttgatgtggagccggggtggtaccgggtgacgctgaacacggaagggtacgccccgtcgtatgtgggtgacattctggtgaaggcggattctgagccgggaacgctgaataaatttctgatggaacaggatgaggcgcagtattacccgaaagcgcttgcagagctggaagcggtggcagcggaaatcctgaagcgtgctgaagcgtcggcggcgagtgcagaggaagcgaagaaacgggcagagaatgcccggggaccggcgggcgagaagggagacacaggtccacagggtgccacaggggcacagggaccagccggggcaacgggggcggtcggaccaaaaggtgagccggggccaaagggagaacggggagaaacaggtccacagggaccgaagggcgataaaggtgacccgggcggaccgccggggccgaaaggtgacaccggcccacgtggagaggccggaccacccggaccacagggtccggcagggcaaaccggcccgaaaggggataaaggtgaacccggcgcaacaggtccggcaggtcccgcaggccctcggggagaaaccggccccgcaggtcctgcgggtcccgcaggcagtgtcgccagtgttccggatgccagcacatcacagaaaggtgttgtacagctgagcagcgataccaacagcgatgatgaaacaaaagcggcaaccccaaaggctgtgaaagcggtaatggcagaagtgcaggcggcaaaaacgaaggcagaagaggcagcaacccgggcagcagtccccggaccgaagggggacaggggggaacctggcgcacctggtgcagtggggcccgcaggcccacggggaccggctggtgcagctggtcccaaaggtgatgcaggcccggcagggccacgaggtgaaaggggacctgcgggggcacagggtgttccggggccggttggtccggcaggtcctgcgggtaaaacggggccacgaggtttgcagggagaaacaggaagacagggcccgacaggtccacagggcccgacaggtgaacccggaccacagggaccacaagggccaaccggaaggctggtacccggggaaatttacagcatcggaacatacattattgccgcactagccccgtatacaaccgacatcggcagaacctatcagccaggagaaactgtacagggttcacgccttaagcgatgcgccataatcaaagatgcaagcgggaactatatgaaagctaacaccgatggcattgacggcaacctatcctcagttccgggctcatggatggtgtgtaatgaaattacgtcgacaaatgacaatgaaggcatcgggctgttccagcgcgcatactga

SEQ ID NO: 337 - DNA, 1440 bp, Escherichia coli
atgacagtcagaatatcgggcgtgctgaaggacggcaccgggaagccggtgccgggatgcaccatagagctgaaagcgcgacgcaccacagagacagtgatagtcaccacggtggcgcaggggcagccggaggaaaccggcagttacagttttgatgtggagccggggtggtaccgggtgacgctgaacacggaagggtacgccccgtcgtatgtgggtgacattctggtgaaggcggattctgagccgggaacgctgaataaatttctgatggaacaggatgaggcgcagtattacccgaaagcgcttgcagagctggaagcggtggcagcggaaatcctgaagcgtgctgaagcgtcggcggcgagtgcagaggaagcgaagaaacgggcagagaatgcccggggaccggcgggcgagaagggggacacaggtccacagggtgccacaggggcaaagggaccagccggggcaacgggggcggtcggaccaaaaggtgagccggggccaaagggagaacggggagaaacaggtccacagggaccgaagggcgataaaggtgacccgggcggaccgccggggccgaaaggtgacaccggcccacgtggagaggccggaccacgaccacagggtccggcagggcaaaccggcccgaaaggggataaaggtgaacccggcgcaacaggtccggcaggtcccgcaggccctcggggagaaaccggccccgcaggtcctgcgggtcccgcaggcagtgtcgccagtgttccggatgccagcacatcacagaaaggtgttgtacagctgagcagcgataccaacagcgatgatgaaacaaaagcggcaaccccaaaggctgtgaaagcggtaatggcagaagtgcaggcagcaaaaacgaaggcagaagaggcagcaacccgggcagcagtccccggaccgaagggggacaggggggaacctggcgcacctggtgcagtggggcccgcaggccctcagggaccggctggtgcagccggagccaaaggtgccccggggccaaaaggggacaaaggcgaacccggagcaacaggtcccgcggggccgcaggggaaaaccggcccggcaggccctcgtggtccggcagggccgcagggggcagcaggcaggaatggtaatgtatccacagaaaaatatgcggttggctctttcttatttggttcgatatcgactctcgaaagtgaaagtgcaattaaagagaatatcaatggcgaaaaaattactgaagtggcgattctttaccgcgttggcgtcacgtattcgcccacgttctcgattgttcataatgccggaaacagtatcccggggacatggcgggcttttgtgtctgctttaagtctgggtgctcccggatacgatgagcagaccatgacaacaaacttaacgttatttcaacgcattgtgtaa

SEQ ID NO: 338 - DNA, 2022 bp, Escherichia coli
gtgagtgttgttgtttcggggacgctgaaatcgcctgatggtcaggttgtatcagatgcgaacattacgctgacggcgctgactgtttcaccggatgcactcagtggcaccagcgcgtcggcagtcaccacgtcaacaggttattacggcatgacgatggagccgggggagtatgcggtttccgtaacggtgagaggtaaaagccaggtctatggccgggtacgcattgacggaacggaaagttcggtgacgctcaacatgctgctgaggcgcagtctggtcgaggtgagtatcagtgatgaactgctgacagatttccggcagatacagaacaacgttgcagatgaccttaccactatccgggaactgaaagaagagtcagtgaagaacaacaccggactcacgcaggccagggaaagtgcggaagccagtgcccggtcggcatcggagagtgctgcgacagcaacggcccgcgccgaagagacagaacagaaagcagaagaggccaaagcgtctgcgacaaatgcggctgcgagtgcggaagaggccagacagcacgcggaaaatgcgcagagtgcacaggcgactgccgaagatgtccttgagcgggcagaggccgcagtagtcagcgcagaggaagcccgaagcatggctgagaatgccagaggccccaaaggtgataccggaccgaaaggtgatacgggtcctcgaggggaaacaggtccggcgggccctcaggggccaacaggtgcgcgcggtgagacaggtcctcagggtagtgtcggcccggcaggtccgcggggtgagaaaggcgagcagggggagcgtggaccacagggattacaggggctgaaaggtgaaaccggagaacgtggacctcagggggtacagggcccggcaggcccgacaggagcaaccggaccggcgggtccacggggtgaacgtggtgaacagggcatacaggggccagccggagcaacaggacctgttgggccacaaggagagcgcggtattcaggggcctgcaggtcctgcgggcccgcgaggtgaaaccggagccagaggtgaaaaaggagaccccggggaccccggcggcccaccgggaccaaagggtgataccggacctgctggccctgccggtgaaaaaggcgaacccggtgagcgtgggcctcagggattacaggggccaccgggtccagccggagagagagggccgacaggcgaagccggacctgcgggtcaaccggggcccaaaggagacccgggtcctgctggcccacagggaccggcgggagagcggggagctcaggggcctcagggtgtagctggtcctgtcggcccggcaggtgcagcgggcgcgaaaggcgataaaggtgaccccggacctgctggtcctcaggggcagcccggtcctcagggacctgctggcgaaaccggacccgcgggtgaacccgggccaagaggtgagcccggtccacagggacttaaaggtgacaggggcgagccaggacctacaggcccacagggaccggcgggagagcggggacctcaggggccacagggtgtagctggtcctgtcggccctgcaggcgaaccgggagcgaaaggcgataaaggtgaccccggaggaaccgaactgcttgcttcagccaatacatggactcaaccacaaactattaatggcgatttgacggtaaccggaaacggctcatttaacgatgttcagatccgttcggataaacgtaacaagcgaaatgcaatacgaatagataattgtctggagaagcttgacctgctaacgggttatttgtatgaaatacagaatgctgatggcagttggcaacaatctgtgggattatttgcacaggatgcgttaaaggctcaaccagagttagttacatctgatacagatatcatatctggagaagagagatttcgattaaattataatggtgttattgcactgttagttgaaggaataaaaaatctgcgtaaagagattagcgaccttaaagagaaataa

SEQ ID NO: 339 - protein, 133 aa, Escherichia coli
AVKISGVLKDGAGKPVVNCAIELRARRTSPTVVAHVVATCVTDNNGAYVIEAEPGYYEVALHCNGWQPTRVGDIDVAPTDAPGTLNAFLNAPKDGDLRPEVMKRFEEMVAQAQQSAGAAAGNAQQTAQDVAPA

SEQ ID NO: 340 - protein, 133 aa, Escherichia coli
AVKISGVLKDGAGKPVVNCAIELRARRTSPTVVAHVVATCVTDNNGAYVIEAEPGYYEVALHCNGWQPTRVGDIDVAPTDAPGTLNAFLNAPKDGDLRPEVMKRFEEMVAQAQQSAGAAAGNAQQTAQDVAAA

SEQ ID NO: 341 - protein, 133 aa, Escherichia coli
AVKISGVLKDGAGKPVVNCAIELRARRTSPTVVAHVVATCVTDNNGAYVIEAEPGYYEVALHCNGWQPTRVGDIDVAPTDAPGTLNAFLNAPKDGDLRPEVMKRFEEMVAQAQQSAGSAAGNAQQTAQDVAAA

SEQ ID NO: 342 - protein, 133 aa, Escherichia coli
AVKISGVLKDGAGKPVVNCAIELRARRTSPTVVAHVVATCVTDNNGAYVIEAEPGYYEVALHCNGWQPTRVGDIDVAPTDAPGTLNAFLNAPKDGDLRPEVMKRFEEMVVQAQQSAGAAAGNAQQTAQDVAAA

SEQ ID NO: 343 - protein, 133 aa, Escherichia coli
SVLIYGALTDGAGIPMSGCHIILKSRVNTSEVVMRTEADVVTGNNGEYSFEARTGKYRVYLKQGWRDEYCVGDIAVYDDAKPGTLNDFLTAPDEGDLKPDVVKRFERMVAQAQQSAESAAESEQQAGQHVADA

SEQ ID NO: 344 - protein, 133 aa, Escherichia coli
SVVISGALIDGAGIPMSGCHIILKSRVNTSEVVMRTVADVVTGNCGEYCFKAQTGKYCVYLKQDWRDEYCVGDIAVYDDSRPGTLNDFLTALDEGDLKPDVVKRFEEMVAQAQQSAEAAAESERQAGQHAADA

SEQ ID NO: 345 - protein, 133 aa, Escherichia coli
SVVISGALTDGAGIPMSGYHIILKSRVNTREVVMHTVADVMTGNDGEYCFHARTGKYGVYLKQDWHNEYNVGDIAVYEDSKPGTLNDFLIAPDEGDLKPDVVKRFEEMVAQAQQSAGAAAGNAQQTAQDVAAA

SEQ ID NO: 346 - protein, 133 aa, Escherichia coli
SVVISGALTDGAGISMSGYHIILKSRVNTPEVVMHTVADVMTGNDGEYCFHARTGKYGVYLKQDWHNEYNVGDIAVYEDSKPGTLNDFLIAPDEGDLKPDVVKRFEEMVAQAQQSAGAAAGNAQQTAQDVAAA

SEQ ID NO: 347 - protein, 133 aa, Escherichia coli
SVVISGALTDGAGIPMSGYHIILKSRVNTPEVVMHTVADVMTGNDGEYCFHARTGKYGVYLKQDWRNEYNVGDIAVYEDSKPGTLNDFLIAPDEGDLKPDVVKRFEEMVAQAQQSAGAAAGNAQQTAQDVAAA

SEQ ID NO: 348 - protein, 133 aa, Escherichia coli
SVVISGALTDGAGIPMSGYHIILKSRVNTPEVVMNTVADVMTGNDGEYCFHARTGKYGVYLKQDWRNEYNVGDIAVYEDSKPGTLNDFLIAPDEGDLKPDVVKRFEEMVAQAQQSAGAAAGNAQQTAQDVAAA

SEQ ID NO: 349 - protein, 133 aa, Escherichia coli
SVVISGALTDGAGIPMSGYHIILKSRVNTPEVVMNTVADVMAGNDGEYCFHARTGKYGVYLKQDWRNEYNVGDIAVYEDSKPGTLNDFLIAPDEGDLKPDVVKRFEEMVAQAQQSAGAAAGNAQQTAQDVAAA

SEQ ID NO: 350 - protein, 133 aa, Escherichia coli
SVVISGALTDGAGIPMSGYHIILKSRVNPPEVVMNTVADVMTGNDGEYCFHARTGKYGVYLKQDWRNEYNVGDIAVYEDSKPGTLNDFLIAPDEGDLKPDVVKRFEEMVAQAQQSAGAAAGNAQQTAQDVAAA

SEQ ID NO: 351 - protein, 133 aa, Escherichia coli
SVVISGALTDGAGIPMSGYHIILKSRVTPPEVVMHTVADVMTGNDGEYCFHARTGKYGVYLKQDWRNEYNVGDIAVYEDSKPGTLNDFLIAPDEGDLKPDVVKRFEEMVAQAQQSAGAAAGNARQTAQDVAAA

SEQ ID NO: 352 - protein, 133 aa, Escherichia coli
SVKISGALIDGAGIPMSGCQIILKARVNTAEVVMRTIATITTGRNGEYSFEAQVGRYCVYLRHGWSNEYCVGDITVYDDSKPGTLNDFLIALDEGDLKPDVVKRFEELVAQAQQSADMAAESAQQVSQSVQDV

SEQ ID NO: 353 - protein, 134 aa, Escherichia coli
TVRISGVLKDGTGKPVPGCTIELKARRTTETVIVTTVAQGQPEETGSYSFDVEPGWYRVTLNTEGYAPSYVGDILVKADSEPGTLNKFLMEQDEAQYYPKALAELEAVAAEILKRAEASAASAEEAKKRAENAR

SEQ ID NO: 354 - protein, 134 aa, Escherichia coli
TVRISGVLKDGTGKPVPGCTIELKARRTTETVIVTTVAQGQPGETGSYSFDVEPGWYRVTLNTEGYAPSYVGDILVKADSEPGTLNKFLMEQDEAQYYPKALAELEAVAAEILKRAEASAASAEEAKKRAENAR

SEQ ID NO: 355 - protein, 133 aa, Escherichia coli
AVKISGVLKDGTGKPVQNCTIQLKARRNSTTVVVNTVASENPDEAGRYSMDVEYGQYSVSLLVEGFPPSHAGIITVYEDSKPGTLNDFLGAMTEDDVRPEALRPFELMVEEVARHAEEAKKNAGEAETSARNA

SEQ ID NO: 356 - protein, 133 aa, Escherichia coli
AVKISGVLKDGTGKPVQNCTIQLKARRNSTTVVVNTVASENPDEAGRYSMDVEYGQYSVSLLVEGFPPSHAGIITVYEDSKPGTLNDFLGAMTEDDVRPEALRRFELMVEEVARHAEEAKKNAGEAETSARNA

SEQ ID NO: 357 - protein, 133 aa, Escherichia coli
TVKISGVLKDGTGKPVQNCTIQLKAKRNSTTVVVNTLASENPDEAGRYSMDVEYGQYSVILLVEGFPPSHAGTITVYEDSQPGTLNDFLGAMTEDDARPEALRRFELMVEEVVRNAEEAKKNAGEAETSARNA

SEQ ID NO: 358 - protein, 133 aa, Escherichia coli
AVKISGVLKDGTGKPVQNCTIQLKAKRNSTTVVVNTLASENPDEAGRYSMDVEYGQYSVILLVEGFPPSHAGTITVYEDSQPGTLNDFLGAMTEDDARPEALRRFELMVEEVARHAEEAKKNAGEAETSARNA

SEQ ID NO: 359 - protein, 133 aa, Escherichia coli
AVKISGVLKDGTGKPVQNCTIQLKAKRNSTTVVVNTLASENPDEAGRYSMDVEYGQYSVILLVEGFPPSHAGTITVYEDSQPGTLNDFLGAMTEDDARPEALRRFEQMVEEAARHAEEAKKNAGEAETSARNA

SEQ ID NO: 360 - protein, 133 aa, Escherichia coli
AVKISGVLKDGTGKPVQNCTIQLKAKRNSTTVVVNTLASENPDEAGRYSMDVEYGQYSVILLVEGFPPSHAGTITVYEDSQPGTLNDFLGAMSEDDVRPEALRRFELMVEEAARHAEEAKKNAGEAETSARNA

SEQ ID NO: 361 - protein, 133 aa, Escherichia coli
AVKISGVLKDGTGKPVQNCTIQLKAKRNSSTVVVNTLASENPDEAGRYSMDVEYGQYSVILLVEGFPPSHAGTITVYEDSQPGTLNDFLGAMSEDDVRPEALRRFELMVEEAARHAEEAKKNAGEAETSARNA

SEQ ID NO: 362 - protein, 134 aa, Escherichia coli
AAVQISGVLKDGAGKPIQNCTIQLKARRNSTTVVVNTVASENPDEAGRYSMDVEYGQYSVTLLVEGFPPSHAGTISVYEDSQPGTLNDFLGAMTEDDARPEALRRFEQMVEEAARHAEEAKKNAGEAETSARNA

SEQ ID NO: 363 - protein, 134 aa, Escherichia coli
AAVQISGVLKDGAGKPIQNCTIQLKARRNSTTVVVNTVASENPDEAGRYSMDVEYGQYSVTLLVEGFPPSHAGTITVYEDSQPGTLNDFLGAMSEDDVRPEALRRFELMVEEAARHAEEAKKNAGEAETSARNA

SEQ ID NO: 364 - protein, 133 aa, Escherichia coli
AVKISGVLKDGTGKPIQNCTIQLKARRNSTTVVVNTVASENPDEAGRYSMDVEYGQYSVTLLVEGFPPSHAGTITVYEDSQPGTLNDFLGAMSEDDVRPEAMRRFELMVEEAARHAEEAKKNAGEAETSARNA

SEQ ID NO: 365 - protein, 133 aa, Escherichia coli
AVKISGVLKDGTGKPVQNCTIQLKAKRNSTTVVVNTVASENPDEAGRYSMDVEYGQYSVTLLVEGFPPSHAGTITVYEDSQPGTLNDFLGAMSEDDVRPEALRRFEQMVEEAARHAGEAKKNAGEAETSARNA

SEQ ID NO: 366 - protein, 133 aa, Escherichia coli
AVKISGVLKDGTGKPVENCTIQLKARRNSATVVVNTVASENPDEAGRYSMDVEYGQYSVILLVEGFPPSHAGTITVYEDSQPGTLNDFLGAMSEDDVRPEALRRFELMVEEAARHAEEAKKNAGEAETSARNA

SEQ ID NO: 367 - protein, 133 aa, Escherichia coli
AVKISGVLKDGTGKPVENCTIQLKARRNSATVVVNTVASENPDEAGRYSMDVEYGQYSVILLVEGFPSSHAGTITVYEDSQPGTLNDFLGAMSEDDVRPEALRRFELMVEEAARHAEEAKKNAGEAETSARNA

SEQ ID NO: 368 - protein, 133 aa, Escherichia coli
AVKISGVLKDGTGKPVENCTIQLKARRNSATVVVNTVASENPDEAGRYSMDVEYGQYSVILLVEGFPPSHAGTITVYEDSQPGTLNDFLGAMSEDDVRPEALRRFELMVEEVARHAEEAKKNAGEAETSARNA

SEQ ID NO: 369 - protein, 133 aa, Escherichia coli
AVKISGVLKDGTGKPVENCTIQLKARRTSSTVVVNTVASENPDEAGRYSMDVEYGQYSVILLVEGFPPSHAGTITVYEDSQPGTLNDFLGAMSEDDVRPEALRRFELMVEEVARHAEEAKKNAGEAETSARNA

SEQ ID NO: 370 - protein, 133 aa, Escherichia coli
AVKISGVLKDGTGKPVENCTIQLKARRTSSTVVVNTVASENPDEAGRYSMDVEYGQYRVILLVEGFPPSHAGTITVYEDSQPGTLNDFLGAMSEDDVRPEALRRFELMVEEVARHAEEAKKNAGEAETSARNA

SEQ ID NO: 371 - protein, 133 aa, Escherichia coli
AVKISGVLKDGTGKPVENCTIQLKARRSSSTVVVNTVASENPDEAGRYSMDVEYGQYSVILLVEGFPPSHAGTITVYEDSQPGTLNDFLGAMSEDDVRPEALRRFELMVEEVARHAEEAKKNAGEAETSARNA

SEQ ID NO: 372 - protein, 133 aa, Escherichia coli
AVKISGVLKDGTGKPVENCTIQLKARRTSSTVVVNTVASENPDEAGRYSMDVEYGQYSVILLVEGFPPSHAGTITVYEDSQPGTLNDFLGAMTEDDARPEALRRFELMVEEVARHAEEAKKNAGEAETSARNA

SEQ ID NO: 373 - protein, 133 aa, Escherichia coli
AVKISGVLKDGTGKPVENCTIQLKARRTSSTVVVNTVASENPDEAGRYSMDVEYGQYSVILLVEGFPPSHAGTITVYEDSRPGTLNDFLGAMTEGDVRPEALRRFELMVEEVARHAEEAKKNAGEAETSARNA

SEQ ID NO: 374 - protein, 133 aa, Escherichia coli
AVKISGVLKDGTGKPVENCTIQLKARRTSSTVVVNTVASENPDEAGRYSMDVEYGQYSVILLVEGFPPSHAGTITVYEDSQPGTLNDFLGAMSEDDVRPEALRRFELMVEEAARHAEEAKKNAGEAETSARNA

SEQ ID NO: 375 - protein, 133 aa, Escherichia coli
AVKISGVLKDGTGKPVENCTIQLKARRTSSTVVVNTVASENPDEAGRYTMDVEYGQYSVILLVEGFPPSHAGTITVYEDSQPGTLNDFLGAMSEDDVRPEALRRFELMVEEAARHAEEAKKNAGEAETSARNA

SEQ ID NO: 376 - protein, 133 aa, Escherichia coli
AVKISGVLKDGTGKPVENCTIQLKARRTSSTVVVNTVASENPDEAGRYSMDVEYGQYSVILLVEGFPPSHAGTITVYEDSQPGTLNDFLGAMSEDDVRPEALRRFELMLEEAARHAEEAKKNAGEAETSARNA

SEQ ID NO: 377 - protein, 138 aa, Escherichia coli
AVKISGVLKDGTGKPVENCTIQLKARRTSSTVVVNTVVVNTVASENPDEAGRYSMDVEYGQYSVILLVEGFPPSHAGIITVYEDSQPGTLNDFLGAMSEDDVRPEALRRFELMVEEAARHAEEAKKNAGEAETSARNA

SEQ ID NO: 378 - protein, 133 aa, Escherichia coli
AVKISGVLKDGTGKPVENCTIQLKARRTSSTVVVNTVASENPDEAGRYSMDVEYGQYSVILLVEGFPPSHAGTITVYEDSRPGTLNDFLGAMSEDDVRPEALRRFELMVEEAARHAGEAKKNAGEAETSARNA

SEQ ID NO: 379 - protein, 133 aa, Escherichia coli
TVKISGVLKDGTGKPVQNCTIVLKARRTSSTVVVNTVASENPDEAGRYSMDVEYGQYSVILLVEGFPPSHAGTITVYEDSQPGTLNDFLGAMSEDDVRPEALRRFELMVEEAARHAEEAKKNAGEAETSARNA

SEQ ID NO: 380 - protein, 133 aa, Escherichia coli
TVKISGVLKDGTGKPVQNCTIVLKARRTSSTVVVNTVASENPDEAGRYSMDVEHGQYSVTLLVEGFPPSHAGTITVYEGSRPGTLNDFLGAMTEDDVRPEALRRFELMVEEAARHAEEAKKNAGEAETSARNA

SEQ ID NO: 381 - protein, 133 aa, Escherichia coli
TVKISGVLKDGTGKPVQNCTIVLKARRTSSTVVVNTVASENPDEAGRYSMDVEHGQYSVTLLVEGFPPSHAGTITVYEDSRPGTLNDFLGAMTEDDARPEALRRFELMVEEVVRNAEEAKKNAGEAETSARNA

SEQ ID NO: 382 - protein, 133 aa, Escherichia coli
TVKISGVLKDGTGKPVQNCTIVLKARRTSSTVVVNTVASENPDEAGRYSMDVEYGQYSVTLLVEDFPPSHAGTITVYEGSRPGTLNDFLGAMTEDDVRPEALRRFELMVNEVARHAGASSQSAAAAKKSETAA

SEQ ID NO: 383 - protein, 133 aa, Escherichia coli
TVKISGVLKDGTGKPVQNCTIVLKARRTSSTVVVNTVASENPDEAGRYSMDVEYGQYSVTLLVEDFPPSHAGTITVYEGSRPGTLNDFLGAMTEDDVMPEALRRFELMVNEVARHAGASSQSAAAAKKSETAA

SEQ ID NO: 384 - protein, 133 aa, Escherichia coli
TVKISGVLKDGTGKPVQNCTIVLKARRTSSTVVVNTVASENPDEAGRYSMDVEYGQYSVTLLVEGFPPSHAGTITVYEGSRPGTLNDFLGAMTEDDVRPEALRRFELMVNEVARHAGASSQSAAAAKKSETAA

SEQ ID NO: 385 - protein, 133 aa, Escherichia coli
AVQISGVLKDGAGKPIQNCTIQLKAKRNSTTVVVNTVASENPDEAGRYSMDVEYGQYSVILLVEGFPPSHAGAITVYEDSKPGTLNDFLGAATEDDVRPEALYRFEKMVEEVARNAEAASQSAAAAKKSETAA

SEQ ID NO: 386 - protein, 133 aa, Escherichia coli
AVQISGVLKDGAGKPIQNCTIQLKAKRNSTTVLVNTVASENPDEAGRYSMDVEHGQYSVILLVEGFPPSHAGTITVYEGSRPGTLNDFLGAMTEEDVMPEALRRFEVMVEDVARNAEAASQSAAAAKKSETAA

SEQ ID NO: 387 - protein, 134 aa, Escherichia coli
AAVKISGVLKDGAGKPIQNCTIQLKAKRNSTTVLVNTVASENPDEAGRYSMDVEYGQYSVILLVEGFPPSHAGTITVYEGSRPGTLNDFLGAMTEEDVMPEALRRFEAMVEEVARNAEAASQSAAAAKKSETAA

SEQ ID NO: 388 - protein, 134 aa, Escherichia coli
AAVKISGVLKDGAGKPIQNCTIQLKAKRNSTTVLVNTVASENPDEAGRYSMDVEYGQYSVILLVEGFPPSHAGTITVYEGSRPGTLNDFLGAMTEDDVMPEALRRFEEMVEEAARNAEAASQSAAAAKKSETAA

SEQ ID NO: 389 - protein, 134 aa, Escherichia coli
AAVKISGVLKDGAGKPIQNCTIQLKAKRNSTTVLVNTVASENPDEVGRYSMDVEYGQYSVILLVEGFPPSHAGTITVYEGSRPGTLNDFLGAMTEDDVMPEALRRFEEMVEEAARNAEAASQSAAAAKKSETAA

SEQ ID NO: 390 - protein, 134 aa, Escherichia coli
AAVKISGVLKDGAGKPIQNCTIQLKAKRNSTTVLVNTVASENPDEAGRYSMDVEYGQYSVTLLVEGFPPSHAGTITVYEGSRPGTLNDFLGAMTEDDVMPEALRRFEAMVEEAARNAEAASQSAAAAKKSETAA

SEQ ID NO: 391 - protein, 133 aa, Escherichia coli
AVQISGVLKDGAGKPIQNCTIQLKAKRNSTTVLVNTVASENPDEAGRYSMDVEYGQYSVILLVEGFPPSHAGTITVYEGSRPGTLNDFLGAMTEDDVMPEALRRFEEMVEEAARNAEAASQSAAAAKKSETAA

SEQ ID NO: 392 - protein, 133 aa, Escherichia coli
TVKISGVLKDGTGKPVQNCTIVLKARRTSSTVVVNTVASENPDEAGRYSMDVEHGQYSVTLLVEGFPPSHAGTITVYEGSRPGTLNDFLGAMTEDDVRPEALRRFEQMVEEVSRNASAVAQNTAAAKKSASDA

SEQ ID NO: 393 - protein, 133 aa, Escherichia coli
AVKISGVLKDGTGKPVQNCTIQLKAKRNSTTVVVNTVASENPDEAGRYSMNVEYGQYSVTLLVEGFPPSHAGTITVCEGSRPGTLNDFLGAMTEDDVCPEALRRFELMVEEVARNASAVAQNTAAAKKSARDA

SEQ ID NO: 394 - protein, 133 aa, Escherichia coli
AVKISGVLKDGTGKPVQNCTIQLKAKRNSTTVVVNTLASENPDEAGRYSMDVEYGQYSVILLVEGFPPSHAGTITVYEDSQPGTLNDFLGAMTEDDARPEALRRFEQMVEEVARNASVVAQNTAAAKKSASDA

SEQ ID NO: 395 - protein, 133 aa, Escherichia coli
AVKISGVLKDGTGKPVQNCTIQLKAKRNSTTVVVNTLASENPDEAGRYSMDVEYGQYSVILMVEGFPPSHAGTITVYEDSKPGTLNDFLGAMTEDDARPEALRRFELMVEEVARNASVVAQNTAAAKKSASDA

SEQ ID NO: 396 - protein, 133 aa, Escherichia coli
AVKISGVLKDGTGKPVQNCTIQLKAKRNSTTVVVNTLASENPDEAGRYSMDVEYGQYSVILLVEGFPPSHAGTITVYEDSRPGTLNDFLGAMTEDDARPEALRRFELMVEEVARNASAVAQNTAAAKKSASDA

SEQ ID NO: 397 - protein, 133 aa, Escherichia coli
AVKISGVLKDGTGKPVQNCTIQLKAKRNSTTVVVNTLASENPDEAGRYSMDVEYGQYSVILLVEGFPPSHAGTITVYEDSRPGTLNDFLGAMTEDDARPEALRRFELMVEEVTRNASAVAQNTAAAKKSASDA

SEQ ID NO: 398 - protein, 133 aa, Escherichia coli
AVKISGVLKDGTGKPVQNCTIQLKAKRNSTTVVVNTLASENPDEAGRYSMDVEYGQYSVILLVEGFPPSHAGTITVYEDSRPGTLNDFLGAMTEDDARPEALRRFELMVEEVARNASAVAQNTAAAKKSAGDA

SEQ ID NO: 399 - protein, 133 aa, Escherichia coli
AVKISGVLKDGTGKPVQNCTIQLKAKRNSTTVVVNTLASENPDEAGRYSMDVEYGQYSVILLVEGFPPSHAGTITVYEDSQPGTLNDFLGAMTEDDARPEALRRFELMVEEVARNASAVAQNTAAAKKSASDA

SEQ ID NO: 400 - protein, 133 aa, Escherichia coli
AVKISGVLKDGAGKPVQNCTIQLKAKRNSTTVVVNTVASENPDEAGRYSMDVEHGQYSVILLVEGFPPSHAGTITVYEDSQPGTLNDFLGAMTEDDARPEALRRFELMVEEVARNASAVAQNTAAAKKSASDA

SEQ ID NO: 401 - protein, 133 aa, Escherichia coli
AVKISGVLKDGAGKPIQNCTIQLKAKRNSTTVVVNTVASENPDEAGRYSMDVEYGQYSVILLVVGFPPSHAGTITVHEDSRPGTLNDFLGAMTEDDARPEALRRFELMVEEVARNASAVAQNTAAAKKSASDA

SEQ ID NO: 402 - protein, 133 aa, Escherichia coli
AVRISGVLKDGAGKPIQNCTIQLKARRNSTTVVVNTVASENPDEAGRYSMDVEYGQYSVILLVEGFPPSHAGTITVYEDSQPGTLNDFLGAMTEDDVRPEALRRFELMVEEVARNASAVAQNTAAAKKSASDA

SEQ ID NO: 403 - protein, 133 aa, Escherichia coli
AVRISGVLKDGAGKPIQNCTIQLKARRNSTTVVVNTVASENPDEAGRYTMDVEYGQYSVSLLVEGFPPSHAGIITVYEDSKPGTLNDFLGAMTEDDVRPEALRRFELMVEEVARNASAVAQNTAAAKKSAGDA

SEQ ID NO: 404 - protein, 133 aa, Escherichia coli
AVKISGVLKDGTGKPVENCTIQLKARRNSATVVVNTVASENPDEAGRYSMDVEYGQYSVILLVEGFPPSHAGTITVYEDSQPGTLNDFLGAMTEDDVRPEALRRFELMVEEVARNASAVAQNTAAAKKSASDA

SEQ ID NO: 405 - protein, 133 aa, Escherichia coli
AVKISGVLKDGTGKPVQNCTIQLKARRNSTTVVVNTVGSENPDEAGRYSMDVEYGQYSVILQVDGFPPSHAGTITVYEDSQPGTLNDFLCAMTEDDARPEVLRRLELMVEEVARNASVVAQSTADAKKSAGDA

SEQ ID NO: 406 - protein, 129 aa, Escherichia coli
AVKISGVLKDGTGKPVQNCTIQLKARRNSTTVVVNTVGSENPDEAGRYSMDVEYGQYSVILQVDGFPPSHAGTITVYEDSQPGTLNDFLCAMTEDDARPEVLRRLELMVEEVARNGKSNVGCNQYVITD

SEQ ID NO: 407 - protein, 133 aa, Escherichia coli
PVLISGVLKDATGTPVQNCTIQLKACRTSTTVVVNTVASENPDDAGRYSMDVEQGQYTVTLLVEGYPPSHAGVITVYDDSKPGTLNDFLGAMTEDDVRPEALRRFEAMVEEVARQASEASRNATSAGQASEQA

SEQ ID NO: 408 - protein, 133 aa, Escherichia coli
PVLISGVLKDATGTPVQNCTIQLKACRTSTTVVVNTVASENPDDAGRYSMDVEQGQYTVTLLVEGYPPSHAGVITVYDDSKPGTLNDFLGAMTEDDVRPEALRRFEAMVEEVARQASEASRNATAAGQASEQA

SEQ ID NO: 409 - protein, 133 aa, Escherichia coli
PVLISGVLKDGTGTPVQNCTIQLKACRTSTTVVVNTVASENPDDAGRYSMDVEQGQYTVTLLVDGYPPSHAGVITVYDDSKLGTLNDFLGAMTEDDVRPEALRRFEAMVEEVARQASEASRNATAAGQASEQA

SEQ ID NO: 410 - protein, 133 aa, Escherichia coli
PVLISGVLKDGTGTPVQNCTIQLKACRTSTTVVVNTVASENPDDAGRYSMDVEQGQYTVTLLVDGYPPSHAGVITVYDDSKPGTLNDFLGAMTEDDVRPEALRRFEAMVEEVARQASEASRNATAAGQASEQA

SEQ ID NO: 411 - protein, 133 aa, Escherichia coli
PVLISGVLKDGTGTPVQNCTIQLKACRTSTTVVVNTVASENPDDAGRYSMDVEQGQYTVTLLVDGYPPSHAGVITVYDDSKPGTLNDFLGAMTEDDVRPEALRSFEAMVEEVARQASEASRNATAAGQASEQA

SEQ ID NO: 412 - protein, 133 aa, Escherichia coli
PVLISGVLKDGTGTPVQNCTIQLKACRTSTTVVVNTVASENPDDAGRYSMDVEQGQYTVTLLVEGYPPSHAGVITVYDDSKPGTLNDFLGAMTEDDVRPEALRRFEAMVEEVARQASEASRNATAAGQASEQA

SEQ ID NO: 413 - protein, 133 aa, Escherichia coli
PVLISGVLKDGTGTPVQNCTIQLKACRTSTTVVVNTMASENPDDAGRYSMDVEQGQYTVTLLVEGYPPSHAGVITVYDDSKPGTLNDFLGAMTEDDVRPEALRRFEAMVEEVARQASEASRNATVAGQASEQA

SEQ ID NO: 414 - protein, 133 aa, Escherichia coli
PVLISGVLKDGAGTPVQNCTIQLKACRTSTTVVVNTVASENPDDAGRYSMDVEQGQYAVTLLVEGYPPSHAGVITVYDDSKPGTLNDFLGAMTEDDVRPEALRRFEAMVEEVARQASEALRNATAAGQASEQA

SEQ ID NO: 415 - protein, 133 aa, Escherichia coli
PVLISGVLKDGTGMPVQNCTIQLKACRTSTAVVVNTVASENPDEAGRYSMDVEQGQYTVTLLVEGYPPSPAGVITVYVDSKPGTLNDFLGAMTEDDVRPEALRRFEAMVEEVARQASEASRNATAAGQASEQA

SEQ ID NO: 416 - protein, 133 aa, Escherichia coli
SIKISGILPGPTGEPAAHIGITLRAIKTSLTVITTLESNSITGTDGAYSLNVEPGKYDVLLWVDGINARRVGTINVYSDSLPGTLNNFLTALREEDGTPEIILQLEQLRAEAVRAALEAKESKNEATQQAGIA

SEQ ID NO: 417 - protein, 133 aa, Escherichia coli
SVVVSGTLKSPDGEAISGANITLTALTVSPDALSGTSASAVTREGGYYGMTMDPGEYAVSVTVKGKTVVYGRVRIEGTESTVTLNMLLRRSLVEVSIPGELLTDFRQIQNNVADDLATIRRLNEDTATKNTQA

SEQ ID NO: 418 - protein, 133 aa, Escherichia coli
SVVVSGTLKSPDGEAISGANITLTALTVSPDALSGTSASAVTREGGYYGMTMDPGEYAVSVTVKGKTAVYGRVRIEGTESTVTLNMLLRRSLVEVSIPGELLTDFRQIQNNVADDLATIRRLNEDTATKNTQA

SEQ ID NO: 419 - protein, 133 aa, Escherichia coli
SVVVSGTLKSPDGEAISGANITLTALTVSPDALSGTSASAVTREGGYYGMTMDPGEYAVSVTVKGKTAVYGRVRIEGTESTVTLNMLLRRSLVEVSIPGELLTDFRQIQNNVADDLATIRRLNEDTATKNNSG

SEQ ID NO: 420 - protein, 133 aa, Escherichia coli
SVVVSGTLKSPDGEAISGANITLTALTVSPDALSGTSASAVTRDGGYYGMTLEPGEYAVSVTVKGKTAVYGRVRIEGTESTVTLNMLLRRSLVEVSIPGELLTDFRQIQNNVADDLATIRRLNEDTAVKNNQA

SEQ ID NO: 421 - protein, 130 aa, Escherichia coli
SVVVSGTLKSPDGQVVSDANITLTALTVSPDALSGTSASAVTTSTGYYGMTMEPGEYAVSVTVRGKSQVYGRVRIDGTESSVTLNMLLRRSLVEVSISDELLTDFRQIQNNVADDLTTIRELKEESVKNN

SEQ ID NO: 422 - protein, 133 aa, Escherichia coli
SILVSGILKSPAGAIIAGAQITLTALTTSPDLLAGVSASAVTSDTGYYGMNVLPGVYSLTVAVNGKSQVYGSFRLDGTETTVTLNMVLRRNLVEVSIPDELLVDFRQIQNNVADDLETIRQLELRASGSADNA

SEQ ID NO: 423 - protein, 130 aa, Escherichia coli
ISGVLLDPSGKAVSGAQITLTAIANSMQVLRGFTCSVMTAENGQYSVRLEEGNYSISVAHQGRNFVYGAVTLTEDSAPSSLNALLHQQVMEQEVTPEVILYFRQIQHKVADDVVIMQRLQHDSSQAARAA

SEQ ID NO: 424 - protein, 133 aa, Escherichia coli
SVTVSGIMINPVGEPVVNAQITLTAVTNSLTVLNAFSATVRTDGVGTYRIQLEEGSYSITVAANGRSFVYGAVTLDNTTGPSTLNQLLKQQIMESELTPDVILYFRQIQQQVANDLATIKVLEISATDAAESA

SEQ ID NO: 425 - protein, 116 aa, Escherichia coli
GISASKAEASAANADTSAEDASESARQAAESAASAKKSEEASSSSASEAAQKASESLQSATDAELSKKTAESAAGNAARDATTSTEKARESAESAQSAEQSRIAAEDAVNRIPTVV

SEQ ID NO: 426 - protein, 116 aa, Escherichia coli
GISASKAEASAANADTSAEDASESARQAAESAASAKKSEEASSSSASEAAQKASESLQSATDAELSKKTAESAAGNAARDATTATEKARESAESAQSAEQSRIAAEDAVNRIPTVV

SEQ ID NO: 427 - protein, 116 aa, Escherichia coli
GISASKAEASAANADTSAEDASESARQAAESAASAKKSEEASSSSASEAAQKASESLQSATDAELSKKTAESAAGNASRDATTATEKARESAESAQSAEQSRIAAEEAVNRIPTVV

SEQ ID NO: 428 - protein, 116 aa, Escherichia coli
GISASQAEESAANADTSAGEASESARQAAESAAAAKKSEEASSSSASEAAQKASESLQSAADAELSKKTAESAAGNAARDATTAAEKARESAESAQSAEQSRIAAEDAVNRIPTVV

SEQ ID NO: 429 - protein, 116 aa, Escherichia coli
GISASQAEESAANADTSAGDASESARQAAESAASAKQSEEASSSSASAAAQKASESLQSATDAELSKKTAESAAGNAVRDATTATEKARESAESAQSAEQSRIAAEEAVNRIPTVV

SEQ ID NO: 430 - protein, 116 aa, Escherichia coli
GISASQAEESAANADTSAGDASESARQAAESAASAKQSEEASSSSASAAAQKASESLQSATDAELSKKTAESAAGNAVRDATTATEKARESTESAQSAEQSRIAAEEAVNRIPTVV

SEQ ID NO: 431 - protein, 116 aa, Escherichia coli
GISASQAEESAANADTSAGDASESARQAAESAASAKQSEEASSSSASAAAQKASESLQSATDAELSKKTAESAAGNAARDATTATEKARESAESAQSAEQSRIAAEEAVNRIPTVV

SEQ ID NO: 432 - protein, 116 aa, Escherichia coli
GISASQAEESAANADTSAGDASESARQAAESAASAKQSEDASSSSASAAAQKASESLQSATDAELSKKMAESAAGNAARDATTATEKARESAESAQSAEQSRIAAEEAVNRIPTVV

SEQ ID NO: 433 - protein, 116 aa, Escherichia coli
GISASQAEESAANADTSAGDASESARQAAESAAAAKQSEEASSSSASAAAQKASESLQSATDAELSKKTAESAAGNAARDATTAAEKARESAESAQSAEQSRIAAEEAVNRIPTVV

SEQ ID NO: 434 - protein, 116 aa, Escherichia coli
GISASQAEENAANADTSAGDASESARQAAESAAAAKQSEEASSSSASAAAQKASESLQSATDAELSKKTAESAAGNAARDATTAAEKARESAESAQSAEQSRIAAEEAVNRIPTVV

SEQ ID NO: 435 - protein, 116 aa, Escherichia coli
GISASQAEESAANADTSAGDASESARQAAESAAAAKQSEEASSSSASAAAQKASESLQSATDAELSKKTAESAAGNAARDATTATEKARESAESAQSAEQSRIAAEEAVNRIPTVV

SEQ ID NO: 436 - protein, 116 aa, Escherichia coli
GISASQAEESAANADTSAGDASESARQAAESAAAAKQSEEASSSSASAAAQKASESLQSAADAELSKKTAESAAGNAARDATTATEKARESAESAQSAEQSRIAAEEAVNRIPTVV

SEQ ID NO: 437 - protein, 116 aa, Escherichia coli
GISASQAEESAANADTSAGDASESARQAAESAAAAKQSEEASSSSASAAAQKASESSQSAAEAELSRKTAESAAGNAARDATTATEKARESAESAQSAEQSRIAAEEAVNRIPTVV

SEQ ID NO: 438 - protein, 116 aa, Escherichia coli
GISASQAEESAAHADTSAGDASESARQAAESAAAAKQSEEASSSSASAAAQKASESSQSAAEAELSRKTAESAAGNAARDATTATEKARESAESAQSAEQSRIAAEEAVNRIPTVV

SEQ ID NO: 439 - protein, 116 aa, Escherichia coli
GISASQAEESAANADTSAGDASESARQAAESAAAAKQSEEASSSSASAAAQKASESSQSAAEAELSRKTAESAAGNAARDATTATEKARESAESAQSAEQSRIAAEDAVNRIPTVV

SEQ ID NO: 440 - protein, 116 aa, Escherichia coli
GISASQAEENAANADTSAGDASESARQAAESAAAAKQSEEASSSSASAAAQKASESSQSAAEAELSRKTAESAAGNASRDATTAAEKARESAESAQSAEQSRIAAEEAVNRIPTVV

SEQ ID NO: 441 - protein, 116 aa, Escherichia coli
GISASQAEENAANADTSAGDASESARQAAESAAAAKQSEEASSSSASAAAQKASESSQSAAEAELSRKTAESAAGNAVRDATTATEKARESAESAQSAEQSRIAAEEAVNRIPTVV

SEQ ID NO: 442 - protein, 116 aa, Escherichia coli
GISASQAEENAANADTSAGDASESARQAAESAAAAKQSEEASSSSASAAAQKASESSQSAAEAELSRKTAESAAGNAARDATTATEKARESAESAQSAEQSRIAAEEAVNRIPTVV

SEQ ID NO: 443 - protein, 116 aa, Escherichia coli
GISASQAEESAANADTSAGEASESARQAAESAAAAKQSEEASSSSASAAAQKASESSQSAAEAELSRKTAESAAGNAARDATTATEKARESAESAQSAEQSRIAAEEAVNRIPTVV

SEQ ID NO: 444 - protein, 115 aa, Escherichia coli
GISASQAEESAANADTSAGEASESARQAAESAAAAKQSEEASSSSASAAAQKASESSQSAAEAELSRKTAESAAGNAARDATTATEKARESAESAQSAEQSRIAAEAVNRIPTVV

SEQ ID NO: 445 - protein, 116 aa, Escherichia coli
GISASQAEEGAANADTSAGEASESARQAAESAAAAKQSEEASSSSASAAAQKASESSQSAAEAELSRKTAESAAGNAARDATTATEKARESAESAQSAEQSRIAAEEAVNRIPTVV

SEQ ID NO: 446 - protein, 116 aa, Escherichia coli
GISSSKAEASAANADTSAGDALESARQAAESAAAAKQSEDASSSSASAAAQKASESSQSAAEAELSRKTAESAAGNAARDATTATEKARESAESAQSAEQSRIAAEEAVNRIPTVV

SEQ ID NO: 447 - protein, 116 aa, Escherichia coli
GISSSKAEASAANADTSAGDASESARQAAESAAAAKQSEEASSSSASAAAQKASESSQSAAEAELSRKTAESAAGNAARDATTATEKARESAESARSAEQSRIAAEEAVNRIPTVV

SEQ ID NO: 448 - protein, 116 aa, Escherichia coli
GISASKAEASAANADTSAEDASESARQAAESAAAAKQSEEASSSSASAAAQKASESLQSAAEAELSRKTAESAAGNAARDATTATEKARESAESAQSAEQSRIAAEEAVNRIPTVV

SEQ ID NO: 449 - protein, 116 aa, Escherichia coli
GISASKAEASAANADTSAGEASESARQATESAASAKQSEEASSSSASAAAQKASESSQSAADAELSRKTAESAAGNAARDATTATEKARESAESAQSAEQSRIAAEEAVNRIPTVV

SEQ ID NO: 450 - protein, 116 aa, Escherichia coli
GISASQAEESAANADTSAGEASESARQAAESAASAKQSEEASSSSASAAAQKASESSQSAAEAELSRKTAESAAGNAARDATTATEKARESAESAQSAEQSRIAAEEAVNRIPTVV

SEQ ID NO: 451 - protein, 116 aa, Escherichia coli
GISASQAEESAANADTSAGDASESARQAVESAASAKQSEEASSSSASAAAQKASESSQSAAEAELSRKTAESAAGNAARDATTATEKARESAESAQSAEQSRIAAEEAVNRIPTVV

SEQ ID NO: 452 - protein, 116 aa, Escherichia coli
GISASQAEESAANADTSAGEASESARQAAESAASAKQSEDASSSSASAAAQKASESSQSAAEAELSRKTAESAAGNAARDATTATEKARESAESAQSAEQSRIAAEEAVNRIPTVV

SEQ ID NO: 453 - protein, 116 aa, Escherichia coli
GISASQAEESAANVDTSAGEASESARQAAESAASAKQSEDASSSSASAAAQKASESSQSAAEAELSRKTAESAAGNAARDATTATEKARESAESAQSAEQSRIAAEEAVNRIPTVV

SEQ ID NO: 454 - protein, 116 aa, Escherichia coli
GISVSQAEASAANADTSAGEASESARQAAESAASAKKSEDASSSSASAAAQKASESSQSAAEAELSRKTAESAAGNAARDATTATEKARESAESAQSAEQSRIAAEEAVNRIPTVV

SEQ ID NO: 455 - protein, 116 aa, Escherichia coli
GISASQAEESAANADTSAGEASESARQAAESAASAKQSEDASSSSASAAAQKASESSQSAADAELSRKTAESAAGNAARDATTAAEKARESAESAQSAEQSRIAAEDAVNRIPTVV

SEQ ID NO: 456 - protein, 116 aa, Escherichia coli
GISASQAEESAANADTSAGEASESARQAAESAASAKQSEDASSSSASAAAQKASESSQSAAEAELSRKTAESAAGNAARDATTATEKARESAESAQSAEQSRIAAEDAVNRIPTVV

SEQ ID NO: 457 - protein, 116 aa, Escherichia coli
GISASQAEESAANADTSAGEASESARQAAESAASAKQSEDASSSSASAAAQKASESSQSAADAELSKKTAESAAGNAARDATTATEKARESAESAQSAEQSRIAAEEAVNRIPTVV

SEQ ID NO: 458 - protein, 116 aa, Escherichia coli
GISASQAEESAANADTSAGDASESARQAAESAASAKQSEDASSSSASAAAQKASESSQSAAEAELSRKTAESAAGNAARDATTATEKARESAESAQSAEQSRIAAEEAVNRIPTVV

SEQ ID NO: 459 - protein, 116 aa, Escherichia coli
GISASQAEESAANADTSAGEASESARQAAESAAAAKQSEDASSSSASAAAQKASESSQSAAEAELSKKTAESAAGNAARDATTATEKARESAESAQSAEQSRIAAEEAVNRIPTVV

SEQ ID NO: 460 - protein, 116 aa, Escherichia coli
GISASQAEESAANADTSAGDASESARQAAESAAAAKQSEDASSSSASAAAQKASESSQSAAEAELSRKTAESAAGNAARDATTATEKARESAESAQSAEQSRIAAEEAVNRIPTVV

SEQ ID NO: 461 - protein, 116 aa, Escherichia coli
GISASQAEESAANADTSAGDALESARQAAESAAAAKQSEDASSSSASAAAQKASESSQSAAEAELSRKTAESAAGNAARDATTATEKARESAESAQSAEQSRIAAEEAVNRIPTVV

SEQ ID NO: 462 - protein, 116 aa, Escherichia coli
GISASQAEESAANADTSAGDALESARQAAESAAAAKQSEEASSSSASAAAQKASESSQSAAEAELSRKTAESAAGNAARDATTATEKARESAESAQSAEQSRIAAEEAVNRIPTVV

SEQ ID NO: 463 - protein, 116 aa, Escherichia coli
GISASQAEESAANADTSAGDASESARQAAESAAAAKQSEEASSSSASAAAQKASESSQSAAEAELSKKTAESAAGNAARDATTATEKARESAESAQSAEQSRIAAEEAVNRIPTVV

SEQ ID NO: 464 - protein, 116 aa, Escherichia coli
GISASQAEESAANADTSAGDASESARQAAESAAAAKQSEEASSSSASAAAQKASESSQSAADAELSRKTAESAAGNAARDATTATEKARESAESAQSAEQSRIAAEEAVNRIPTVV

SEQ ID NO: 465 - protein, 116 aa, Escherichia coli
GISASQAEESAANADTSAGDASESARQAAESAAAAKQSEEASSSSASAAAQKASESSQSAADAELSKKTAESAAGNAARDATTATEKARESAESAQSAEQSRIAAEEAVNRIPTVV

SEQ ID NO: 466 - protein, 116 aa, Escherichia coli
GISASQAEESAANADTSAGDASESARQAAESAAAAKQSEEASSSSASAAAQKASESSQSAADAELSKKTAESAAGNAARMQRPQQKKPGSQQKAHSQREQSRIAAEEAVNRIPTVV

SEQ ID NO: 467 - protein, 109 aa, Escherichia coli
TQSKESAAASAKSASDSAKTATSRAAEAGQKATDATEAATRAVTAAGNAEESSTRAGESEKAAGADAEKARQHAEKARLAQESAGEILKRAEAATVSAEEARRMAENAR

SEQ ID NO: 468 - protein, 95 aa, Escherichia coli
SQSKESAAASAKTASESAKAATSKATESAQKASEAAEAATRAGESEKAAAADAKEARQHAETARVAQEAAGDVLKRAEAATVSAEEARRMAENAR

SEQ ID NO: 469 - protein, 91 aa, Escherichia coli
TGLTQARESAEASARSASESAATATARAEETEQKAEEAKASATNAAASAEEARQHAENAQSAQATAEDVLERAEAAVVSAEEARSMAENAR

SEQ ID NO: 470 - protein, 245 aa, Escherichia coli
VRTAADAKASAESAARSEADAADSEKKAEQFARNLQDAVAKAGDSASAAALSAAGAGEQATAAKSAALEAADSKAATEKAASNAALSEKNAADSALAARTSENSAADSATKADASEKAAVLYEQTSSTHETNAGQSAADAALSATKAADSALNAGKSATEAAGYATDAQTQAGNAKRAATDATTAKDEIVRQISGFDEHVSQQETVITAKGQTLVDQARTEAINAGQAAQHAAQVLEDAINASIK

SEQ ID NO: 471 - protein, 76 aa, Escherichia coli
QIRFRLGPGNIIETNSNGWFPDTDGALITGLTFLDPKDATRVQGFFQHLQVRFGDGPWQDVKGLDEVGSDTGRTGE

SEQ ID NO: 472 - protein, 76 aa, Escherichia coli
QIRFRMGPGNIIETNSNGWFPDTDGALITGLTFLDPKDATRVQGFFQHLQVRFGDGPWQDVKGLDEVGSDTGRTGE

SEQ ID NO: 473 - protein, 76 aa, Escherichia coli
QIRFRLGPGNIIETNSNGWFPGTDGALITGLTFLDPKDATRVQGFFQHLQVRFGDGPWQDVKGLDEVGSDTGRTGE

SEQ ID NO: 474 - protein, 76 aa, Escherichia coli
QIRFRLGPGNIIETNSHGWFPDTDGALITGLTFLDPKDATRVQGFFQHLQVRFGDGPWQDVKGLDEVGSDTGRTGE

SEQ ID NO: 475 - protein, 76 aa, Escherichia coli
QIRFRLGPGNIIETNSHGWFPDTDGALITGLTFLDPKDATRVQVFFQHLQVRFGDGPWQDVKGLDEVGSDTGRTGE

SEQ ID NO: 476 - protein, 76 aa, Escherichia coli
QIRFRLGPGNIIETNSHGWFPDTDGALITGLTFLDPKDTTRVQGFFQHLQVRFGDGPWQDVKGLDEVGSDTGRTGE

SEQ ID NO: 477 - protein, 76 aa, Escherichia coli
QIRFRLGPGNIIETNSHGWFPDTDGALITGLTFLDPKDTTRVQGFFRHLQVRFGDGPWQDVKGLDEVGSDTGRTGE

SEQ ID NO: 478 - protein, 76 aa, Escherichia coli
QIRFRLGPGNIIETNSHGWFPDTDGALITGLTFLAPKDATRVQGFFQHLQVRFGDGPWQDVKGLDEVGSDTGRTGE

SEQ ID NO: 479 - protein, 76 aa, Escherichia coli
QIRFRLGPGNIIETNSNGWFPDTDGALITGLTFLAPKDATRVQGFFQHLQVRFGDGPWQDVKGLDEVGSDTGRTGE

SEQ ID NO: 480 - protein, 76 aa, Escherichia coli
QIRFRLGPGNIIETNSNGWFPDTDGALITGLTFLAPKDATRVQVFFQHLQVRFGDGPWQDVKGLDEVGSDTGRTGE

SEQ ID NO: 481 - protein, 76 aa, Escherichia coli
QIRFRLGPGNIIETNSNGWFPDTDGALITGLTFLAPKDTTRVQGFFQHLQVRFGDGPWQDVKGLDEVGSDTGRTGE

SEQ ID NO: 482 - protein, 76 aa, Escherichia coli
QIRFRLGPASIIETNSHGWFPGTDGALITGLTFLAPKDATRVQVFFQHLQVRFGDGPWQDVKGLDEVGSDTGRTGE

SEQ ID NO: 483 - protein, 76 aa, Escherichia coli
QIRFRLGPASIIETNSHGWFPGTDGALITGLTFLAPKDTTRVQGFFQHLQVRFGDGPWQDVKGLDEVGSDTGRTGE

SEQ ID NO: 484 - protein, 76 aa, Escherichia coli
QIRFRLGPASIIETNSHGWFPDTDGALITGLTFLDPKDATRVQGFFQHLQVRFGDGPWQDVKGLDEVGSDTGRTGE

SEQ ID NO: 485 - protein, 76 aa, Escherichia coli
QIRFRLGPASIIETNSNGWFPDTDGALITGLTFLDPKDATRVQGFFQHLQVRFGDGPWQDVKGLDEVGSDTGRTGE

SEQ ID NO: 486 - protein, 76 aa, Escherichia coli
QIRFRLGPGNIIETNSNGWFPDTDGALITGLTFLDPKDATRVQGLFQHLQVRFGDGPWQDVKGLDEVGSDTGRTGE

SEQ ID NO: 487 - protein, 76 aa, Escherichia coli
QIRFRLGPASIIETNSNGWFPDTDGALITGLTFLDPKDATQVQGLFRHLQVRFGDGPWQDVKGLDEVGSDTGRTGE

SEQ ID NO: 488 - protein, 76 aa, Escherichia coli
QIRFRLGPASIIETNSHGWFPDTDGALITGLTFLDPKDATQVQGLFRHLQVRFGDGPWQDVKGLDEVGSDTGRTGE

SEQ ID NO: 489 - protein, 76 aa, Escherichia coli
QIRFRLGPASIIETNSNGWFPDTDGALITGLTFLDPKDATQVQGLFQHLQVRFGDGPWQDVKGLDEVGSDTGRTGE

SEQ ID NO: 490 - protein, 76 aa, Escherichia coli
QIRFRLGPASIIETNSNGWFPDTDGALITGLTFLDPKDATQVQGLFQHLQVRFGDGPWQDVKGLDEVGSDTGSSGE

SEQ ID NO: 491 - protein, 76 aa, Escherichia coli
QIRFRLGPASIIETNSNGWFPDTDGALITGLTFLDPKDATQVQGLFQHLQVRFGDGPWQDVKGLNEVGSDTGRTGE

SEQ ID NO: 492 - protein, 76 aa, Escherichia coli
QIRFRLGPMRIIETNSYGWFPGTDGALITGLTFLDPKDATQVQGMFQHLQVRFGDGPWQDVKGLDEVGSDTGRTGE

SEQ ID NO: 493 - protein, 76 aa, Escherichia coli
QIRFRLGPASIIETNSYGWFPGTDGALITGLTFLDPKDATQVQGMFQHLQVRFGDGPWQDVKGLDEVGSDTGRTGE

SEQ ID NO: 494 - protein, 76 aa, Escherichia coli
QIRFRLGPASIIETNSNGWFPGTDGALITGLTFLDPKDATQVQGMFQHLQVRFGDGPWQDVKGLDEVGSDTGRTGE

SEQ ID NO: 495 - protein, 76 aa, Escherichia coli
QIRFRLGPASIIETNSNGWFPGTDGALITGLTFLDPKDATQVQGLFQHLQVRFGDGPWQDVKGLDEVGSDTGRTGE

SEQ ID NO: 496 - protein, 76 aa, Escherichia coli
QIRFRLGPASIIETNSNGWFPGTDGALITGLTFLDPKDATQVQGFFQHLQVRFGDGPWQDVKGLDEVGSDTGRTGE

SEQ ID NO: 497 - protein, 76 aa, Escherichia coli
QIRFRLGPGNIIETNSNGWFPDTDGALITGLTFLDPKDATQVQGLFRHLQVRFGDGPWQDVKGLNEVGSDTGRTGE

SEQ ID NO: 498 - protein, 76 aa, Escherichia coli
QIRFRLGPGNIIETNSNGWFPDTDGALITGLTFLDPKDTTQVQGLFRHLQVRFGDGPWQDVKGLNEVGSDTGRTGE

SEQ ID NO: 499 - protein, 76 aa, Escherichia coli
QIRFRLGPGNIIETNSHGWFPDTDGALITGLTFLDPKDATQVQGLFRHLQVRFGDGPWQDVKGLNEVGSDTGRTGE

SEQ ID NO: 500 - protein, 76 aa, Escherichia coli
QIRFRLGPGNIIETNSNGWFPDTDGALITGLTFLDPKDATQVQGLFRHLQVRFGDGPWQDVKGLDEVGSDTGRTGE

SEQ ID NO: 501 - protein, 67 aa, Escherichia coli
VQSLTAQLRLGPADILESDENGIIPEQDRVITQVVILDADKKQIQCVVRPLQILRADGRWENIGGMK

SEQ ID NO: 502 - protein, 67 aa, Escherichia coli
VQSLTAQLRLGPADILESDENGIIPEQARVITQVVILDADKKQIQCVVRPLQILRADGRWENIGGMK

SEQ ID NO: 503 - protein, 67 aa, Escherichia coli
VQSPTAQLRLGPADILESDENGIIPEQARVITQVVILDADKKQIQCVVRPLQILRADGTWENIGGMK

SEQ ID NO: 504 - protein, 67 aa, Escherichia coli
VQSPTAQLRLGPADILESDENSIIPEQARVITQVVILDADKKQIQCVVRPLQILRADGTWENIGGMK

SEQ ID NO: 505 - protein, 67 aa, Escherichia coli
VQSPTAQLRLGPADILESDENGIIPEQARVITQVVILDADKKQIQCVVRPLQILRADGTWENIGWMK

SEQ ID NO: 506 - protein, 67 aa, Escherichia coli
VQSPTAQLRLGPADILESDENGIIPEQDRVITQVVILDADKKQIQCVVRPLQILRADGTWENIGGMK

SEQ ID NO: 507 - protein, 67 aa, Escherichia coli
VQSLTAQLRLGPADILESDENGIIPEQDRVITQVVILDADKKQIQCVVRPLQILRADGTWENIGGMK

SEQ ID NO: 508 - protein, 67 aa, Escherichia coli
VQSLTAQLRLGPADILESDENGIIPEQDRVITQVVILDADKKQIQCVVRPLQILRGDGTWENIGGMK

SEQ ID NO: 509 - protein, 67 aa, Escherichia coli
VQSLTAQLRLGPADILESDENGIIPEQDRVITQVVILDTDKKLIQCVVRPLQILRADGTWENIGGMK

SEQ ID NO: 510 - protein, 67 aa, Escherichia coli
VQSLTAQLRLGPADILESDENGIIPEQDRVITQVVILDADKKQIQCVVRPLQILRADGTWENVGGMK

SEQ ID NO: 511 - protein, 67 aa, Escherichia coli
VQSLTAQLRLGPADILESDENGIIPEQDRVITQVVILDADKKQIQCVVRPLQILRADGTWENIGEMK

SEQ ID NO: 512 - protein, 67 aa, Escherichia coli
GQSLTAQLRLGPADILESDENGIIPEQARVITQVVILDADKKQIQCVVRPLQILRADGTWENIGGMK

SEQ ID NO: 513 - protein, 67 aa, Escherichia coli
GQSLTAQLRLGPADILESDENGIIPEQDRVITQVVILDADKKQIQCVVRPLQILRADGTWENIGGMK

SEQ ID NO: 514 - protein, 67 aa, Escherichia coli
GQSLTVQLRLGPADILESDENGIIPEQDRVITQVVILDADKKQIQCVVRPLQILRADGTWENIGGMK

SEQ ID NO: 515 - protein, 67 aa, Escherichia coli
GQSLTVQLRLGPADILESDESGIIPEQDRVITQVVILDADKKQIQCVVRPLQILRADGTWENIGGMK

SEQ ID NO: 516 - protein, 67 aa, Escherichia coli
GQSLTVQLRLGPADILESDENGIIPEQVRVITQVVILDADKKQIQCVVRPLQILRADGTWENIGGMK

SEQ ID NO: 517 - protein, 67 aa, Escherichia coli
GQSLTVQLRLGPADILESDENGIIPEQDGVITQVVILDADKKQIQCVVRPLQILRADGRWENIGGMK

SEQ ID NO: 518 - protein, 67 aa, Escherichia coli
GQSLTVQLRLGPADILESDENGIIPEQDRVITQVVILDADKKQIQCMVRPLQILRADGRWENIGGMK

SEQ ID NO: 519 - protein, 67 aa, Escherichia coli
GQSLTAQLRLGPADILESDENGIIPEQDRVITQVVILDADKKQIQCVVRPLQILRADGRWENIGGMK

SEQ ID NO: 520 - protein, 67 aa, Escherichia coli
GELLTAQLRLGPADILESDENGIIPEQARVITQVVILDADKKQIQCVVRPLQILRADGTWENIGGMK

SEQ ID NO: 521 - protein, 67 aa, Escherichia coli
GELLTAQLRLGPADILESDENGIIPEQARVITQVVILDTDKKQIQCVVRPLQILRADGTWENIGGMK

SEQ ID NO: 522 - protein, 67 aa, Escherichia coli
GELLTAQLRLGPADILESDENGIIPEQDRVITQVVILDADKKQIQCVVRPLQILRADGTWENIGGMK

SEQ ID NO: 523 - protein, 67 aa, Escherichia coli
GELLTAQLRLGPADILESDENGIIPEQDRVITQVVILDADKKQIQCVVRPLQILRADGRWENIGGMK

SEQ ID NO: 524 - protein, 67 aa, Escherichia coli
GELLTAQLRLGPADILESDENGIIPEQDRVITQVVILDADKKQIQCVVRPLQILRADGVWENVGGMK

SEQ ID NO: 525 - protein, 67 aa, Escherichia coli
GGLLTAQLRLGPADILESDENGIIPEQDRVITQVVILDADKKQIQCVVRPLQILRADGTWENIGGMK

SEQ ID NO: 526 - protein, 67 aa, Escherichia coli
GGLLTAQLRLGPADILESDENGIIPEQDRVITQVVILDADKKQIQCVVRPLQILRADGRWENIGGMK

SEQ ID NO: 527 - protein, 67 aa, Escherichia coli
GRSLTAQLRLGPADILESDENGIIPEQDRVITQVVILDADKKQIQCVVRPLQILRADGTWENIGGMK

SEQ ID NO: 528 - protein, 92 aa, Escherichia coli
VPGEIYSIGTYIIAALGPYITDIGRTYQPGETVSGSRLKRCALIKDENGNYMKANTDGIDGNLSSVPGSWMVCNEITSTNDNEGIGLFQRAY

SEQ ID NO: 529 - protein, 92 aa, Escherichia coli
VPGEIYSIGTYIIAALGPYITDIGRTYQPGETVSGSRLKRCALIKDENGNYMKANTDGIDGILSSVPGSWMVCNEITSTNDNESIGLFQRAY

SEQ ID NO: 530 - protein, 92 aa, Escherichia coli
VPGEIYSIGTYIIAALAPYTTDIGRTYQPGETVQGSRLKRCAIIKDASGNYMKANTDGIDGNLSSVPGSWMVCNEITSTNDNEGIGLFQRAY

SEQ ID NO: 531 - protein, 94 aa, Escherichia coli
STEKYAVGSFLFGSISTLESESAIKENINGEKITEVAILYRVGVTYSPTFSIVHNAGNSIPGTWRAFVSALSLGAPGYDEQTMTTNLTLFQRIV

SEQ ID NO: 532 - protein, 1014 aa, Homo sapiens
GPMGPSGPRGLPGPPGAPGPQGFQGPPGEPGEPGASGPMGPRGPPGPPGKNGDDGEAGKPGRPGERGPPGPQGARGLPGTAGLPGMKGHRGFSGLDGAKGDAGPAGPKGEPGSPGENGAPGQMGPRGLPGERGRPGAPGPAGARGNDGATGAAGPPGPTGPAGPPGFPGAVGAKGEAGPQGPRGSEGPQGVRGEPGPPGPAGAAGPAGNPGADGQPGAKGANGAPGIAGAPGFPGARGPSGPQGPGGPPGPKGNSGEPGAPGSKGDTGAKGEPGPVGVQGPPGPAGEEGKRGARGEPGPTGLPGPPGERGGPGSRGFPGADGVAGPKGPAGERGSPGPAGPKGSPGEAGRPGEAGLPGAKGLTGSPGSPGPDGKTGPPGPAGQDGRPGPPGPPGARGQAGVMGFPGPKGAAGEPGKAGERGVPGPPGAVGPAGKDGEAGAQGPPGPAGPAGERGEQGPAGSPGFQGLPGPAGPPGEAGKPGEQGVPGDLGAPGPSGARGERGFPGERGVQGPPGPAGPRGANGAPGNDGAKGDAGAPGAPGSQGAPGLQGMPGERGAAGLPGPKGDRGDAGPKGADGSPGKDGVRGLTGPIGPPGPAGAPGDKGESGPSGPAGPTGARGAPGDRGEPGPPGPAGFAGPPGADGQPGAKGEPGDAGAKGDAGPPGPAGPAGPPGPIGNVGAPGAKGARGSAGPPGATGFPGAAGRVGPPGPSGNAGPPGPPGPAGKEGGKGPRGETGPAGRPGEVGPPGPPGPAGEKGSPGADGPAGAPGTPGPQGIAGQRGVVGLPGQRGERGFPGLPGPSGEPGKQGPSGASGERGPPGPMGPPGLAGPPGESGREGAPGAEGSPGRDGSPGAKGDRGETGPAGPPGAPGAPGAPGPVGPAGKSGDRGETGPAGPTGPVGPVGARGPAGPQGPRGDKGETGEQGDRGIKGHRGFSGLQGPPGPPGSPGEQGPSGASGPAGPRGPPGSAGAPGKDGLNGLPGPIGPPGPRGRTGDAGPVGPPGPPGPPGPPGPP

SEQ ID NO: 533 - protein, 1014 aa, Homo sapiens
GPMGLMGPRGPPGAAGAPGPQGFQGPAGEPGEPGQTGPAGARGPAGPPGKAGEDGHPGKPGRPGERGVVGPQGARGFPGTPGLPGFKGIRGHNGLDGLKGQPGAPGVKGEPGAPGENGTPGQTGARGLPGERGRVGAPGPAGARGSDGSVGPVGPAGPIGSAGPPGFPGAPGPKGEIGAVGNAGPAGPAGPRGEVGLPGLSGPVGPPGNPGANGLTGAKGAAGLPGVAGAPGLPGPRGIPGPVGAAGATGARGLVGEPGPAGSKGESGNKGEPGSAGPQGPPGPSGEEGKRGPNGEAGSAGPPGPPGLRGSPGSRGLPGADGRAGVMGPPGSRGASGPAGVRGPNGDAGRPGEPGLMGPRGLPGSPGNIGPAGKEGPVGLPGIDGRPGPIGPAGARGEPGNIGFPGPKGPTGDPGKNGDKGHAGLAGARGAPGPDGNNGAQGPPGPQGVQGGKGEQGPPGPPGFQGLPGPSGPAGEVGKPGERGLHGEFGLPGPAGPRGERGPPGESGAAGPTGPIGSRGPSGPPGPDGNKGEPGVVGAVGTAGPSGPSGLPGERGAAGIPGGKGEKGEPGLRGEIGNPGRDGARGAPGAVGAPGPAGATGDRGEAGAAGPAGPAGPRGSPGERGEVGPAGPNGFAGPAGAAGQPGAKGERGAKGPKGENGVVGPTGPVGAAGPAGPNGPPGPAGSRGDGGPPGMTGFPGAAGRTGPPGPSGISGPPGPPGPAGKEGLRGPRGDQGPVGRTGEVGAVGPPGFAGEKGPSGEAGTAGPPGTPGPQGLLGAPGILGLPGSRGERGLPGVAGAVGEPGPLGIAGPPGARGPPGAVGSPGVNGAPGEAGRDGNPGNDGPPGRDGQPGHKGERGYPGNIGPVGAAGAPGPHGPVGPAGKHGNRGETGPSGPVGPAGAVGPRGPSGPQGIRGDKGEPGEKGPRGLPGLKGHNGLQGLPGIAGHHGDQGAPGSVGPAGPRGPAGPSGPAGKDGRTGHPGTVGPAGIRGPQGHQGPAGPPGPPGPPGPPGVS

SEQ ID NO: 534 - protein, 1014 aa, Homo sapiens
GPMGPMGPRGPPGPAGAPGPQGFQGNPGEPGEPGVSGPMGPRGPPGPPGKPGDDGEAGKPGKAGERGPPGPQGARGFPGTPGLPGVKGHRGYPGLDGAKGEAGAPGVKGESGSPGENGSPGPMGPRGLPGERGRTGPAGAAGARGNDGQPGPAGPPGPVGPAGGPGFPGAPGAKGEAGPTGARGPEGAQGPRGEPGTPGSPGPAGASGNPGTDGIPGAKGSAGAPGIAGAPGFPGPRGPPGPQGATGPLGPKGQTGEPGIAGFKGEQGPKGEPGPAGPQGAPGPAGEEGKRGARGEPGGVGPIGPPGERGAPGNRGFPGQDGLAGPKGAPGERGPSGLAGPKGANGDPGRPGEPGLPGARGLTGRPGDAGPQGKVGPSGAPGEDGRPGPPGPQGARGQPGVMGFPGPKGANGEPGKAGEKGLPGAPGLRGLPGKDGETGAAGPPGPAGPAGERGEQGAPGPSGFQGLPGPPGPPGEGGKPGDQGVPGEAGAPGLVGPRGERGFPGERGSPGAQGLQGPRGLPGTPGTDGPKGASGPAGPPGAQGPPGLQGMPGERGAAGIAGPKGDRGDVGEKGPEGAPGKDGGRGLTGPIGPPGPAGANGEKGEVGPPGPAGSAGARGAPGERGETGPPGPAGFAGPPGADGQPGAKGEQGEAGQKGDAGAPGPQGPSGAPGPQGPTGVTGPKGARGAQGPPGATGFPGAAGRVGPPGSNGNPGPPGPPGPSGKDGPKGARGDSGPPGRAGEPGLQGPAGPPGEKGEPGDDGPSGAEGPPGPQGLAGQRGIVGLPGQRGERGFPGLPGPSGEPGKQGAPGASGDRGPPGPVGPPGLTGPAGEPGREGSPGADGPPGRDGAAGVKGDRGETGAVGAPGAPGPPGSPGPAGPTGKQGDRGEAGAQGPMGPSGPAGARGIQGPQGPRGDKGEAGEPGERGLKGHRGFTGLQGLPGPPGPSGDQGASGPAGPSGPRGPPGPVGPSGKDGANGIPGPIGPPGPRGRSGETGPAGPPGNPGPPGPPGPP

SEQ ID NO: 535 - protein, 1029 aa, Homo sapiens
GLAGYPGPAGPPGPPGPPGTSGHPGSPGSPGYQGPPGEPGQAGPSGPPGPPGAIGPSGPAGKDGESGRPGRPGERGLPGPPGIKGPAGIPGFPGMKGHRGFDGRNGEKGETGAPGLKGENGLPGENGAPGPMGPRGAPGERGRPGLPGAAGARGNDGARGSDGQPGPPGPPGTAGFPGSPGAKGEVGPAGSPGSNGAPGQRGEPGPQGHAGAQGPPGPPGINGSPGGKGEMGPAGIPGAPGLMGARGPPGPAGANGAPGLRGGAGEPGKNGAKGEPGPRGERGEAGIPGVPGAKGEDGKDGSPGEPGANGLPGAAGERGAPGFRGPAGPNGIPGEKGPAGERGAPGPAGPRGAAGEPGRDGVPGGPGMRGMPGSPGGPGSDGKPGPPGSQGESGRPGPPGPSGPRGQPGVMGFPGPKGNDGAPGKNGERGGPGGPGPQGPPGKNGETGPQGPPGPTGPGGDKGDTGPPGPQGLQGLPGTGGPPGENGKPGEPGPKGDAGAPGAPGGKGDAGAPGERGPPGLAGAPGLRGGAGPPGPEGGKGAAGPPGPPGAAGTPGLQGMPGERGGLGSPGPKGDKGEPGGPGADGVPGKDGPRGPTGPIGPPGPAGQPGDKGEGGAPGLPGIAGPRGSPGERGETGPPGPAGFPGAPGQNGEPGGKGERGAPGEKGEGGPPGVAGPPGGSGPAGPPGPQGVKGERGSPGGPGAAGFPGARGLPGPPGSNGNPGPPGPSGSPGKDGPPGPAGNTGAPGSPGVSGPKGDAGQPGEKGSPGAQGPPGAPGPLGIAGITGARGLAGPPGMPGPRGSPGPQGVKGESGKPGANGLSGERGPPGPQGLPGLAGTAGEPGRDGNPGSDGLPGRDGSPGGKGDRGENGSPGAPGAPGHPGPPGPVGPAGKSGDRGESGPAGPAGAPGPAGSRGAPGPQGPRGDKGETGERGAAGIKGHRGFPGNPGAPGSPGPAGQQGAIGSPGPAGPRGPVGPSGPPGKDGTSGHPGPIGPPGPRGNRGERGSEGSPGHPGQPGPPGPPGAPGPC

SEQ ID NO: 536 - protein, 1268 aa, Homo sapiens
GERGFPGIPGTPGPPGLPGLQGPVGPPGFTGPPGPPGPPGPPGEKGQMGLSFQGPKGDKGDQGVSGPPGVPGQAQVQEKGDFATKGEKGQKGEPGFQGMPGVGEKGEPGKPGPRGKPGKDGDKGEKGSPGFPGEPGYPGLIGRQGPQGEKGEAGPPGPPGIVIGTGPLGEKGERGYPGTPGPRGEPGPKGFPGLPGQPGPPGLPVPGQAGAPGFPGERGEKGDRGFPGTSLPGPSGRDGLPGPPGSPGPPGQPGYTNGIVECQPGPPGDQGPPGIPGQPGFIGEIGEKGQKGESCLICDIDGYRGPPGPQGPPGEIGFPGQPGAKGDRGLPGRDGVAGVPGPQGTPGLIGQPGAKGEPGEFYFDLRLKGDKGDPGFPGQPGMTGRAGSPGRDGHPGLPGPKGSPGSVGLKGERGPPGGVGFPGSRGDTGPPGPPGYGPAGPIGDKGQAGFPGGPGSPGLPGPKGEPGKIVPLPGPPGAEGLPGSPGFPGPQGDRGFPGTPGRPGLPGEKGAVGQPGIGFPGPPGPKGVDGLPGDMGPPGTPGRPGFNGLPGNPGVQGQKGEPGVGLPGLKGLPGLPGIPGTPGEKGSIGVPGVPGEHGAIGPPGLQGIRGEPGPPGLPGSVGSPGVPGIGPPGARGPPGGQGPPGLSGPPGIKGEKGFPGFPGLDMPGPKGDKGAQGLPGITGQSGLPGLPGQQGAPGIPGFPGSKGEMGVMGTPGQPGSPGPVGAPGLPGEKGDHGFPGSSGPRGDPGLKGDKGDVGLPGKPGSMDKVDMGSMKGQKGDQGEKGQIGPIGEKGSRGDPGTPGVPGKDGQAGQPGQPGPKGDPGISGTPGAPGLPGPKGSVGGMGLPGTPGEKGVPGIPGPQGSPGLPGDKGAKGEKGQAGPPGIGIPGLRGEKGDQGIAGFPGSPGEKGEKGSIGIPGMPGSPGLKGSPGSVGYPGSPGLPGEKGDKGLPGLDGIPGVKGEAGLPGTPGPTGPAGQKGEPGSDGIPGSAGEKGEPGLPGRGFPGFPGAKGDKGSKGEVGFPGLAGSPGIPGSKGEQGFMGPPGPQGQPGLPGSPGHATEGPKGDRGPQGQPGLPGLPGPMGPPGLPGIDGVKGDKGNPGWPGAPGVPGPKGDPGFQGMPGIGGSPGITGSKGDMGPPGVPGFQGPKGLPGLQGIKGDQGDQGVPGAKGLPGPPGPPGPYDIIKGEPGLPGPEGPPGLKGLQGLPGPKGQQGVTGLVGIPGPPGIPGFDGAPGQKGEMGPAGPTGPRGFPGPPGPDGLPGSMGPPGTP

SEQ ID NO: 537 - protein, 1301 aa, Homo sapiens
GEPGEPGLVGFQGPPGRPGHVGQMGPVGAPGRPGPPGPPGPKGQQGNRGLGFYGVKGEKGDVGQPGPNGIPSDTLHPIIAPTGVTFHPDQYKGEKGSEGEPGIRGISLKGEEGIMGFPGLRGYPGLSGEKGSPGQKGSRGLDGYQGPDGPRGPKGEAGDPGPPGLPAYSPHPSLAKGARGDPGFPGAQGEPGSQGEPGDPGLPGPPGLSIGDGDQRRGLPGEMGPKGFIGDPGIPALYGGPPGPDGKRGPPGPPGLPGPPGPDGFLFGLKGAKGRAGFPGLPGSPGARGPKGWKGDAGECRCTEGDEAIKGLPGLPGPKGFAGINGEPGRKGDRGDPGQHGLPGFPGLKGVPGNIGAPGPKGAKGDSRTITTKGERGQPGVPGVPGMKGDDGSPGRDGLDGFPGLPGPPGDGIKGPPGDPGYPGIPGTKGTPGEMGPPGLGLPGLKGQRGFPGDAGLPGPPGFLGPPGPAGTPGQIDCDTDVKRAVGGDRQEAIQPGCIGGPKGLPGLPGPPGPTGAKGLRGIPGFAGADGGPGPRGLPGDAGREGFPGPPGFIGPRGSKGAVGLPGPDGSPGPIGLPGPDGPPGERGLPGEVLGAQPGPRGDAGVPGQPGLKGLPGDRGPPGFRGSQGMPGMPGLKGQPGLPGPSGQPGLYGPPGLHGFPGAPGQEGPLGLPGIPGREGLPGDRGDPGDTGAPGPVGMKGLSGDRGDAGFTGEQGHPGSPGFKGIDGMPGTPGLKGDRGSPGMDGFQGMPGLKGRPGFPGSKGEAGFFGIPGLKGLAGEPGFKGSRGDPGPPGPPPVILPGMKDIKGEKGDEGPMGLKGYLGAKGIQGMPGIPGLSGIPGLPGRPGHIKGVKGDIGVPGIPGLPGFPGVAGPPGITGFPGFIGSRGDKGAPGRAGLYGEIGATGDFGDIGDTINLPGRPGLKGERGTTGIPGLKGFFGEKGTEGDIGFPGITGVTGVQGPPGLKGQTGFPGLTGPPGSQGELGRIGLPGGKGDDGWPGAPGLPGFPGLRGIRGLHGLPGTKGFPGSPGSDIHGDPGFPGPPGERGDPGEANTLPGPVGVPGQKGDQGAPGERGPPGSPGLQGFPGITPPSNISGAPGDKGAPGIFGLKGYRGPPGPPGSAALPGSKGDTGNPGAPGTPGTKGWAGDSGPQGRPGVFGLPGEKGPRGEQGFMGNTGPTGAVGDRGPKGPKGDPGFPGAPGTVGAPGIAGIPQKIAVQPGTVGPQGRRGPPGAPGEMGPQGPPGEPGFRGAPGKAGPQGRGGVSAVPGFRGDEGPIGHQGPIGQEGAPGRPGSPGLPGMPGR

SEQ ID NO: 538 - protein, 1396 aa, Homo sapiens
GAKGEKGEKGFPGPPGSPGQKGFTGPEGLPGPQGPKGFPGLPGLTGSKGVRGISGLPGFSGSPGLPGTPGNTGPYGLVGVPGCSGSKGEQGFPGLPGTLGYPGIPGAAGLKGQKGAPAKEEDIELDAKGDPGLPGAPGPQGLPGPPGFPGPVGPPGPPGFFGFPGAMGPRGPKGHMGERVIGHKGERGVKGLTGPPGPPGTVIVTLTGPDNRTDLKGEKGDKGAMGEPGPPGPSGLPGESYGSEKGAPGDPGLQGKPGKDGVPGFPGSEGVKGNRGFPGLMGEDGIKGQKGDIGPPGFRGPTEYYDTYQEKGDEGTPGPPGPRGARGPQGPSGPPGVPGSPGSSRPGLRGAPGWPGLKGSKGERGRPGKDAMGTPGSPGCAGSPGLPGSPGPPGPPGDIVFRKGPPGDHGLPGYLGSPGIPGVDGPKGEPGLLCTQCPYIPGPPGLPGLPGLHGVKGIPGRQGAAGLKGSPGSPGNTGLPGFPGFPGAQGDPGLKGEKGETLQPEGQVGVPGDPGLRGQPGRKGLDGIPGTPGVKGLPGPKGELALSGEKGDQGPPGDPGSPGSPGPAGPAGPPGYGPQGEPGLQGTQGVPGAPGPPGEAGPRGELSVSTPVPGPPGPPGPPGHPGPQGPPGIPGSLGKCGDPGLPGPDGEPGIPGIGFPGPPGPKGDQGFPGTKGSLGCPGKMGEPGLPGKPGLPGAKGEPAVAMPGGPGTPGFPGERGNSGEHGEIGLPGLPGLPGTPGNEGLDGPRGDPGQPGPPGEQGPPGRCIEGPRGAQGLPGLNGLKGQQGRRGKTGPKGDPGIPGLDRSGFPGETGSPGIPGHQGEMGPLGQRGYPGNPGILGPPGEDGVIGMMGFPGAIGPPGPPGNPGTPGQRGSPGIPGVKGQRGTPGAKGEQGDKGNPGPSEISHVIGDKGEPGLKGFAGNPGEKGNRGVPGMPGLKGLKGLPGPAGPPGPRGDLGSTGNPGEPGLRGIPGSMGNMGMPGSKGKRGTLGFPGRAGRPGLPGIHGLQGDKGEPGYSEGTRPGPPGPTGDPGLPGDMGKKGEMGQPGPPGHLGPAGPEGAPGSPGSPGLPGKPGPHGDLGFKGIKGLLGPPGIRGPPGLPGFPGSPGPMGIRGDQGRDGIPGPAGEKGETGLLRAPPGPRGNPGAQGAKGDRGAPGFPGLPGRKGAMGDAGPRGPTGIEGFPGPPGLPGAIIPGQTGNRGPPGSRGSPGAPGPPGPPGSHVIGIKGDKGSMGHPGPKGPPGTAGDMGPPGRLGAPGTPGLPGPRGDPGFQGFPGVKGEKGNPGFLGSIGPPGPIGPKGPPGVRGDPGTLKIISLPGSPGPPGTPGEPGMQGEPGPPGPPGNLGPCGPRGKPGKDGKPGTPGPAGEKGNKGSKGEPGPAGSDGLPGLKGKRGDSGSP

SEQ ID NO: 539 - protein, 1395 aa, Homo sapiens
GPPGPPGPQGPIGPLGAPGPIGLSGEKGMRGDRGPPGAAGDKGDKGPTGVPGFPGLDGIPGHPGPPGPRGKPGMSGHNGSRGDPGFPGGRGALGPGGPLGHPGEKGEKGNSVFILGAVKGIQGDRGDPGLPGLPGSWGAGGPAGPTGYPGEPGLVGPPGQPGRPGLKGNPGVGVKGQMGDPGEVGQQGSPGPTLLVEPPDFCLYKGEKGIKGIPGMVGLPGPPGRKGESGIGAKGEKGIPGFPGPRGDPGSYGSPGFPGLKGELGLVGDPGLFGLIGPKGDPGNRGHPGPPGVLVTPPLPLKGPPGDPGFPGRYGETGDVGPPGPPGLLGRPGEACAGMIGPPGPQGFPGLPGLPGEAGIPGRPDSAPGKPGKPGSPGLPGAPGLQGLPGSSVIYCSVGNPGPQGIKGKVGPPGGRGPKGEKGNEGLCACEPGPMGPPGPPGLPGRQGSKGDLGLPGWLGTKGDPGPPGAEGPPGLPGKHGASGPPGNKGAKGDMVVSRVKGHKGERGPDGPPGFPGQPGSHGRDGHAGEKGDPGPPGDHEDATPGGKGFPGPLGPPGKAGPVGPPGLGFPGPPGERGHPGVPGHPGVRGPDGLKGQKGDTISCNVTYPGRHGPPGFDGPPGPKGFPGPQGAPGLSGSDGHKGRPGTPGTAEIPGPPGFRGDMGDPGFGGEKGSSPVGPPGPPGSPGVNGQKGIPGDPAFGHLGPPGKRGLSGVPGIKGPRGDPGCPGAEGPAGIPGFLGLKGPKGREGHAGFPGVPGPPGHSCERGAPGIPGQPGLPGYPGSPGAPGGKGQPGDVGPPGPAGMKGLPGLPGRPGAHGPPGLPGIPGPFGDDGLPGPPGPKGPRGLPGFPGFPGERGKPGAEGCPGAKGEPGEKGMSGLPGDRGLRGAKGAIGPPGDEGEMAIISQKGTPGEPGPPGDDGFPGERGDKGTPGMQGRRGEPGRYGPPGFHRGEPGEKGQPGPPGPPGPPGSTGLRGFIGFPGLPGDQGEPGSPGPPGFSGIDGARGPKGNKGDPASHFGPPGPKGEPGSPGCPGHFGASGEQGLPGIQGPRGSPGRPGPPGSSGPPGCPGDHGMPGLRGQPGEMGDPGPRGLQGDPGIPGPPGIKGPSGSPGLNGLHGLKGQKGTKGASGLHDVGPPGPVGIPGLKGERGDPGSPGISPPGPRGKKGPPGPPGSSGPPGPAGATGRAPKDIPDPGPPGDQGPPGPDGPRGAPGPPGLPGSVDLLRGEPGDCGLPGPPGPPGPPGPPGYKGFPGCDGKDGQKGPVGFPGPQGPHGFPGPPGEKGLPGPPGRKGPTGLPGPRGEPGPPADVDDCPRIPGLPGAPGMRGPEGAMGLPGMRGPSGPGCKGEPGLDGRRGVDGVPGSPGPPGRKGDTGEDGYPGGPGPPGPIGDPGPKGFG

SEQ ID NO: 540 - protein, 1415 aa, Homo sapiens
GIKGEKGERGFPGLEGHPGLPGFPGPEGPPGPRGQKGDDGIPGPPGPKGIRGPPGLPGFPGTPGLPGMPGHDGAPGPQGIPGCNGTKGERGFPGSPGFPGLQGPPGPPGIPGMKGEPGSIIMSSLPGPKGNPGYPGPPGIQGLPGPTGIPGPIGPPGPPGLMGPPGPPGLPGPKGNMGLNFQGPKGEKGEQGLQGPPGPPGQISEQKRPIDVEFQKGDQGLPGDRGPPGPPGIRGPPGPPGGEKGEKGEQGEPGKRGKPGKDGENGQPGIPGLPGDPGYPGEPGRDGEKGQKGDTGPPGPPGLVIPRPGTGITIGEKGNIGLPGLPGEKGERGFPGIQGPPGLPGPPGAAVMGPPGPPGFPGERGQKGDEGPPGISIPGPPGLDGQPGAPGLPGPPGPAGPHIPPSDEICEPGPPGPPGSPGDKGLQGEQGVKGDKGDTCFNCIGTGISGPPGQPGLPGLPGPPGSLGFPGQKGEKGQAGATGPKGLPGIPGAPGAPGFPGSKGEPGDILTFPGMKGDKGELGSPGAPGLPGLPGTPGQDGLPGLPGPKGEPGGITFKGERGPPGNPGLPGLPGNIGPMGPPGFGPPGPVGEKGIQGVAGNPGQPGIPGPKGDPGQTITQPGKPGLPGNPGRDGDVGLPGDPGLPGQPGLPGIPGSKGEPGIPGIGLPGPPGPKGFPGIPGPPGAPGTPGRIGLEGPPGPPGFPGPKGEPGFALPGPPGPPGLPGFKGALGPKGDRGFPGPPGPPGRTGLDGLPGPKGDVGPNGQPGPMGPPGLPGIGVQGPPGPPGIPGPIGQPGLHGIPGEKGDPGPPGLDVPGPPGERGSPGIPGAPGPIGPPGSPGLPGKAGASGFPGTKGEMGMMGPPGPPGPLGIPGRSGVPGLKGDDGLQGQPGLPGPTGEKGSKGEPGLPGPPGPMDPNLLGSKGEKGEPGLPGIPGVSGPKGYQGLPGDPGQPGLSGQPGLPGPPGPKGNPGLPGQPGLIGPPGLKGTIGDMGFPGPQGVEGPPGPSGVPGQPGSPGLPGQKGDKGDPGISSIGLPGLPGPKGEPGLPGYPGNPGIKGSVGDPGLPGLPGTPGAKGQPGLPGFPGTPGPPGPKGISGPPGNPGLPGEPGPVGGGGHPGQPGPPGEKGKPGQDGIPGPAGQKGEPGQPGFGNPGPPGLPGLSGQKGDGGLPGIPGNPGLPGPKGEPGFHGFPGVQGPPGPPGSPGPALEGPKGNPGPQGPPGRPGLPGPEGPPGLPGNGGIKGEKGNPGQPGLPGLPGLKGDQGPPGLQGNPGRPGLNGMKGDPGLPGVPGFPGMKGPSGVPGSAGPEGEPGLIGPPGPPGLPGPSGQSIIIKGDAGPPGIPGQPGLKGLPGPQGPQGLPGPTGPPGDPGRNGLPGFDGAGGRKGDPGLPGQPGTRGLDGPPGPDGLQGPPGPPGTS

SEQ ID NO: 541 - protein, 1417 aa, Homo sapiens
GARGRPGPIGIQGPTGPQGFTGSTGLSGLKGERGFPGLLGPYGPKGDKGPMGVPGFLGINGIPGHPGQPGPRGPPGLDGCNGTQGAVGFPGPDGYPGLLGPPGLPGQKGSKGDPVLAPGSFKGMKGDPGLPGLDGITGPQGAPGFPGAVGPAGPPGLQGPPGPPGPLGPDGNMGLGFQGEKGVKGDVGLPGPAGPPPSTGELEFMGFPKGKKGSKGEPGPKGFPGISGPPGFPGLGTTGEKGEKGEKGIPGLPGPRGPMGSEGVQGPPGQQGKKGTLGFPGLNGFQGIEGQKGDIGLPGPDVFIDIDGAVISGNPGDPGVPGLPGLKGDEGIQGLRGPSGVPGLPALSGVPGALGPQGFPGLKGDQGNPGRTTIGAAGLPGRDGLPGPPGPPGPPSPEFETETLHNKESGFPGLRGEQGPKGNLGLKGIKGDSGFCACDGGVPNTGPPGEPGPPGPWGLIGLPGLKGARGDRGSGGAQGPAGAPGLVGPLGPSGPKGKKGEPILSTIQGMPGDRGDSGSQGFRGVIGEPGKDGVPGLPGLPGLPGDGGQGFPGEKGLPGLPGEKGHPGPPGLPGNGLPGLPGPRGLPGDKGKDGLPGQQGLPGSKGITLPCIIPGSYGPSGFPGTPGFPGPKGSRGLPGTPGQPGSSGSKGEPGSPGLVHLPELPGFPGPRGEKGLPGFPGLPGKDGLPGMIGSPGLPGSKGATGDIFGAENGAPGEQGLQGLTGHKGFLGDSGLPGLKGVHGKPGLLGPKGERGSPGTPGQVGQPGTPGSSGPYGIKGKSGLPGAPGFPGISGHPGKKGTRGKKGPPGSIVKKGLPGLKGLPGNPGLVGLKGSPGSPGVAGLPALSGPKGEKGSVGFVGFPGIPGLPGIPGTRGLKGIPGSTGKMGPSGRAGTPGEKGDRGNPGPVGIPSPRRPMSNLWLKGDKGSQGSAGSNGFPGPRGDKGEAGRPGPPGLPGAPGLPGIIKGVSGKPGPPGFMGIRGLPGLKGSSGITGFPGMPGESGSQGIRGSPGLPGASGLPGLKGDNGQTVEISGSPGPKGQPGESGFKGTKGRDGLIGNIGFPGNKGEDGKVGVSGDVGLPGAPGFPGVAGMRGEPGLPGSSGHQGAIGPLGSPGLIGPKGFPGFPGLHGLNGLPGTKGTHGTPGPSITGVPGPAGLPGPKGEKGYPGIGIGAPGKPGLRGQKGDRGFPGLQGPAGLPGAPGISLPSLIAGQPGDPGRPGLDGERGRPGPAGPPGPPGPSSNQGDTGDPGFPGIPGPKGPKGDQGIPGFSGLPGELGLKGMRGEPGFMGTPGKVGPPGDPGFPGMKGKAGPRGSSGLQGDPGQTPTAEAVQVPPGPLGLPGIDGIPGLTGDPGAQGPVGLQGSKGLPGIPGKDGPSGLPGPPGALGDPGLPGLQGPPGFEGAPGQQGPFGMPGMPGQS

SEQ ID NO: 542 - protein, 1014 aa, Homo sapiens
GPAGPMGLTGRPGPVGPPGSGGLKGEPGDVGPQGPRGVQGPPGPAGKPGRRGRAGSDGARGMPGQTGPKGDRGFDGLAGLPGEKGHRGDPGPSGPPGPPGDDGERGDDGEVGPRGLPGEPGPRGLLGPKGPPGPPGPPGVTGMDGQPGPKGNVGPQGEPGPPGQQGNPGAQGLPGPQGAIGPPGEKGPLGKPGLPGMPGADGPPGHPGKEGPPGEKGGQGPPGPQGPIGYPGPRGVKGADGIRGLKGTKGEKGEDGFPGFKGDMGIKGDRGEIGPPGPRGEDGPEGPKGRGGPNGDPGPLGPPGEKGKLGVPGLPGYPGRQGPKGSIGFPGFPGANGEKGGRGTPGKPGPRGQRGPTGPRGERGPRGITGKPGPKGNSGGDGPAGPPGERGPNGPQGPTGFPGPKGPPGPPGKDGLPGHPGQRGETGFQGKTGPPGPPGVVGPQGPTGETGPMGERGHPGPPGPPGEQGLPGLAGKEGTKGDPGPAGLPGKDGPPGLRGFPGDRGLPGPVGALGLKGNEGPPGPPGPAGSPGERGPAGAAGPIGIPGRPGPQGPPGPAGEKGAPGEKGPQGPAGRDGLQGPVGLPGPAGPVGPPGEDGDKGEIGEPGQKGSKGDKGEQGPPGPTGPQGPIGQPGPSGADGEPGPRGQQGLFGQKGDEGPRGFPGPPGPVGLQGLPGPPGEKGETGDVGQMGPPGPPGPRGPSGAPGADGPQGPPGGIGNPGAVGEKGEPGEAGEPGLPGEGGPPGPKGERGEKGESGPSGAAGPPGPKGPPGDDGPKGSPGPVGFPGDPGPPGEPGPAGQDGPPGDKGDDGEPGQTGSPGPTGEPGPSGPPGKRGPPGPAGPEGRQGEKGAKGEAGLEGPPGKTGPIGPQGAPGKPGPDGLRGIPGPVGEQGLPGSPGPDGPPGPMGPPGLPGLKGDSGPKGEKGHPGLIGLIGPPGEQGEKGDRGLPGPQGSSGPKGEQGITGPSGPIGPPGPPGLPGPPGPKGAKGSSGPTGPKGEAGHPGPPGPPGPPGEV

SEQ ID NO: 543 - protein, 1017 aa, Homo sapiens
GSVGPVGPRGPQGLQGQQGGAGPTGPPGEPGDPGPMGPIGSRGPEGPPGKPGEDGEPGRNGNPGEVGFAGSPGARGFPGAPGLPGLKGHRGHKGLEGPKGEVGAPGSKGEAGPTGPMGAMGPLGPRGMPGERGRLGPQGAPGQRGAHGMPGKPGPMGPLGIPGSSGFPGNPGMKGEAGPTGARGPEGPQGQRGETGPPGPVGSPGLPGAIGTDGTPGAKGPTGSPGTSGPPGSAGPPGSPGPQGSTGPQGIRGQPGDPGVPGFKGEAGPKGEPGPHGIQGPIGPPGEEGKRGPRGDPGTVGPPGPVGERGAPGNRGFPGSDGLPGPKGAQGERGPVGSSGPKGSQGDPGRPGEPGLPGARGLTGNPGVQGPEGKLGPLGAPGEDGRPGPPGSIGIRGQPGSMGLPGPKGSSGDPGKPGEAGNAGVPGQRGAPGKDGEVGPSGPVGPPGLAGERGEQGPPGPTGFQGLPGPPGPPGEGGKPGDQGVPGDPGAVGPLGPRGERGNPGERGEPGITGLPGEKGMAGGHGPDGPKGSPGPSGTPGDTGPPGLQGMPGERGIAGTPGPKGDRGGIGEKGAEGTAGNDGARGLPGPLGPPGPAGPTGEKGEPGPRGLVGPPGSRGNPGSRGENGPTGAVGFAGPQGPDGQPGVKGEPGEPGQKGDAGSPGPQGLAGSPGPHGPNGVPGLKGGRGTQGPPGATGFPGSAGRVGPPGPAGAPGPAGPLGEPGKEGPPGLRGDPGSHGRVGDRGPAGPPGGPGDKGDPGEDGQPGPDGPPGPAGTTGQRGIVGMPGQRGERGMPGLPGPAGTPGKVGPTGATGDKGPPGPVGPPGSNGPVGEPGPEGPAGNDGTPGRDGAVGERGDRGDPGPAGLPGSQGAPGTPGPVGAPGDAGQRGDPGSRGPIGPPGRAGKRGLPGPQGPRGDKGDHGDRGDRGQKGHRGFTGLQGLPGPPGPNGEQGSAGIPGPFGPRGPPGPVGPSGKEGNPGPLGPIGPPGVRGSVGEAGPEGPPGEPGPPGPPGPPGHL

SEQ ID NO: 544 - protein, 1011 aa, Homo sapiens
GPPGPVGLTGRPGPVGLPGHPGLKGEEGAEGPQGPRGLQGPHGPPGRVGKMGRPGADGARGLPGDTGPKGDRGFDGLPGLPGEKGQRGDFGHVGQPGPPGEDGERGAEGPPGPTGQAGEPGPRGLLGPRGSPGPTGRPGVTGIDGAPGAKGNVGPPGEPGPPGQQGNHGSQGLPGPQGLIGTPGEKGPPGNPGIPGLPGSDGPLGHPGHEGPTGEKGAQGPPGSAGPPGYPGPRGVKGTSGNRGLQGEKGEKGEDGFPGFKGDVGLKGDQGKPGAPGPRGEDGPEGPKGQAGQAGEEGPPGSAGEKGKLGVPGLPGYPGRPGPKGSIGFPGPLGPIGEKGKSGKTGQPGLEGERGPPGSRGERGQPGATGQPGPKGDVGQDGAPGIPGEKGLPGLQGPPGFPGPKGPPGHQGKDGRPGHPGQRGELGFQGQTGPPGPAGVLGPQGKTGEVGPLGERGPPGPPGPPGEQGLPGLEGREGAKGELGPPGPLGKEGPAGLRGFPGPKGGPGDPGPTGLKGDKGPPGPVGANGSPGERGPLGPAGGIGLPGQSGSEGPVGPAGKKGSRGERGPPGPTGKDGIPGPLGPLGPPGAAGPSGEEGDKGDVGAPGHKGSKGDKGDAGPPGQPGIRGPAGHPGPPGADGAQGRRGPPGLFGQKGDDGVRGFVGVIGPPGLQGLPGPPGEKGEVGDVGSMGPHGAPGPRGPQGPTGSEGTPGLPGGVGQPGAVGEKGERGDAGDPGPPGAPGIPGPKGDIGEKGDSGPSGAAGPPGKKGPPGEDGAKGSVGPTGLPGDLGPPGDPGVSGIDGSPGEKGDPGDVGGPGPPGASGEPGAPGPPGKRGPSGHMGREGREGEKGAKGEPGPDGPPGRTGPMGARGPPGRVGPEGLRGIPGPVGEPGLLGAPGQMGPPGPLGPSGLPGLKGDTGPKGEKGHIGLIGLIGPPGEAGEKGDQGLPGVQGPPGPKGDPGPPGPIGSLGHPGPPGVAGPLGQKGSKGSPGSMGPRGDTGPAGPPGPPGAP

SEQ ID NO: 545 - protein, 336 aa, Homo sapiens
GPPGLRGDPGFEGERGKPGLPGEKGEAGDPGRPGDLGPVGYQGMKGEKGSRGEKGSRGPKGYKGEKGKRGIDGVDGVKGEMGYPGLPGCKGSPGFDGIQGPPGPKGDPGAFGLKGEKGEPGADGEAGRPGSSGPSGDEGQPGEPGPPGEKGEAGDEGNPGPDGAPGERGGPGERGPRGTPGTRGPRGDPGEAGPQGDQGREGPVGVPGDPGEAGPIGPKGYRGDEGPPGSEGARGAPGPAGPPGDPGLMGERGEDGPAGNGTEGFPGFPGYPGNRGAPGINGTKGYPGLKGDEGEAGDPGDDNNDIAPRGVKGAKGYRGPEGPQGPPGHQGPPGPD

SEQ ID NO: 546 - protein, 335 aa, Homo sapiens
GPSGPKGYRGQKGAKGNMGEPGEPGQKGRQGDPGIEGPIGFPGPKGVPGFKGEKGEFGADGRKGAPGLAGKNGTDGQKGKLGRIGPPGCKGDPGNRGPDGYPGEAGSPGERGDQGGKGDPGRPGRRGPPGEIGAKGSKGYQGNSGAPGSPGVKGAKGGPGPRGPKGEPGRRGDPGTKGSPGSDGPKGEKGDPGPEGPRGLAGEVGNKGAKGDRGLPGPRGPQGALGEPGKQGSRGDPGDAGPRGDSGQPGPKGDPGRPGFSYPGPRGAPGEKGEPGPRGPEGGRGDFGLKGEPGRKGEKGEPADPGPPGEPGPRGPRGVPGPEGEPGPPGDPGLT

SEQ ID NO: 547 - protein, 336 aa, Homo sapiens
GQRGDRGPIGSIGPKGIPGEDGYRGYPGDEGGPGERGPPGVNGTQGFQGCPGQRGVKGSRGFPGEKGEVGEIGLDGLDGEDGDKGLPGSSGEKGNPGRRGDKGPRGEKGERGDVGIRGDPGNPGQDSQERGPKGETGDLGPMGVPGRDGVPGGPGETGKNGGFGRRGPPGAKGNKGGPGQPGFEGEQGTRGAQGPAGPAGPPGLIGEQGISGPRGSGGAAGAPGERGRTGPLGRKGEPGEPGPKGGIGNRGPRGETGDDGRDGVGSEGRRGKKGERGFPGYPGPKGNPGEPGLNGTTGPKGIRGRRGNSGPPGIVGQKGDPGYPGPAGPKGNRGDS

SEQ ID NO: 548 - protein, 336 aa, Homo sapiens
GIPGPHGTRGLQAMKGSQGLKGSRGHRGEDGNPGVRGDTGPQGDKGIAGCPGAWGQKGLKGFSGPKGGHGDDGIDGLDGEEGCHGFPGIKGEKGDPGSQGSPGSRGAPGQYGEKGFPGDPGNPGQNNNIKGQKGSKGEQGRQGRSGQKGVQGSPSSRGSRGREGQRGLRGVSGEPGNPGPTGTLGAEGLQGPQGSQGNPGRKGEKGSQGQKGPQGSPGLMGAKGSTGRPGLLGKKGEPGLPGDLGPVGQTGQRGRQGDSGIPGYGQMGRKGVKGPRGFPGDAGQKGDIGNPGIPGGPGPKGFRGLALTVGLKGEEGSRGLPGPPGQRGIKGMAGQP

SEQ ID NO: 549 - protein, 336 aa, Homo sapiens
GGDGTMGDPGPPGKRGPPGFKGSEGYLGEEGIAGERGAPGPVGEQGTKGCYGTKGPKGNRGLNGQEGEVGENGIDGLNGEQGDNGLPGRKGEKGDEGSQGSPGKRGTPGDRGAKGLRGDPGAPGVDSSIEGPTGLKGERGRQGRRGWPGPPGTPGSRRKTAAHGRRGHTGPQGTAGIPGPDGLEGSLGLKGPQGPRGEAGVKGEKGGVGSKGPQGPPGPGGEAGNQGRLGSQGNKGEPGDLGEKGAVGFPGPRGLQGNDGSPGYGSVGRKGAKGQEGFPGESGPKGEIGDPGGPGETGLKGARGKMISAGLPGEMGSPGEPGPPGRKGVKGAKGLA

SEQ ID NO: 550 - protein, 1530 aa, Homo sapiens
GQKGEPGEMGLRGQVGPPGDPGLPGRTGAPGPQGPPGSATAKGERGFPGADGRPGSPGRAGNPGTPGAPGLKGSPGLPGPRGDPGERGPRGPKGEPGAPGQVIGGEGPGLPGRKGDPGPSGPPGPRGPLGDPGPRGPPGLPGTAMKGDKGDRGERGPPGPGEGGIAPGEPGLPGLPGSPGPQGPVGPPGKKGEKGDSEDGAPGLPGQPGSPGEQGPRGPPGAIGPKGDRGFPGPLGEAGEKGERGPPGPAGSRGLPGVAGRPGAKGPEGPPGPTGRQGEKGEPGRPGDPAVVGPAVAGPKGEKGDVGPAGPRGATGVQGERGPPGLVLPGDPGPKGDPGDRGPIGLTGRAGPPGDSGPPGEKGDPGRPGPPGPVGPRGRDGEVGEKGDEGPPGDPGLPGKAGERGLRGAPGVRGPVGEKGDQGDPGEDGRNGSPGSSGPKGDRGEPGPPGPPGRLVDTGPGAREKGEPGDRGQEGPRGPKGDPGLPGAPGERGIEGFRGPPGPQGDPGVRGPAGEKGDRGPPGLDGRSGLDGKPGAAGPSGPNGAAGKAGDPGRDGLPGLRGEQGLPGPSGPPGLPGKPGEDGKPGLNGKNGEPGDPGEDGRKGEKGDSGASGREGRDGPKGERGAPGILGPQGPPGLPGPVGPPGQGFPGVPGGTGPKGDRGETGSKGEQGLPGERGLRGEPGSVPNVDRLLETAGIKASALREIVETWDESSGSFLPVPERRRGPKGDSGEQGPPGKEGPIGFPGERGLKGDRGDPGPQGPPGLALGERGPPGPSGLAGEPGKPGIPGLPGRAGGVGEAGRPGERGERGEKGERGEQGRDGPPGLPGTPGPPGPPGPKVSVDEPGPGLSGEQGPPGLKGAKGEPGSNGDQGPKGDRGVPGIKGDRGEPGPRGQDGNPGLPGERGMAGPEGKPGLQGPRGPPGPVGGHGDPGPPGAPGLAGPAGPQGPSGLKGEPGETGPPGRGLTGPTGAVGLPGPPGPSGLVGPQGSPGLPGQVGETGKPGAPGRDGASGKDGDRGSPGVPGSPGLPGPVGPKGEPGPTGAPGQAVVGLPGAKGEKGAPGGLAGDLVGEPGAKGDRGLPGPRGEKGEAGRAGEPGDPGEDGQKGAPGPKGFKGDPGVGVPGSPGPPGPPGVKGDLGLPGLPGAPGVVGFPGQTGPRGEMGQPGPSGERGLAGPPGREGIPGPLGPPGPPGSVGPPGASGLKGDKGDPGVGLPGPRGERGEPGIRGEDGRPGQEGPRGLTGPPGSRGERGEKGDVGSAGLKGDKGDSAVILGPPGPRGAKGDMGERGPRGLDGDKGPRGDNGDPGDKGSKGEPGDKGSAGLPGLRGLLGPQGQPGAAGIPGDPGSPGKDGVPGIRGEKGDVGFMGPRGLKGERGVKGACGLDGEKGDKGEAGPPGRPGLAGHKGEMGEPGVPGQSGAPGKEGLIGPKGDRGFDGQPGPKGDQGEKGERGTPGIGGFPGPSGNDGSAGPPGPPGSVGPRGPEGLQGQKGERGPPGERVVGAPGVPGAPGERGEQGRPGPAGPRGEKGEA

SEQ ID NO: 551 - protein, 454 aa, Homo sapiens
GEQGPRGEPGPRGPPGPPGLPGHGIPGIKGKPGPQGYPGVGKPGMPGMPGKPGAMGMPGAKGEIGQKGEIGPMGIPGPQGPPGPHGLPGIGKPGGPGLPGQPGPKGDRGPKGLPGPQGLRGPKGDKGFGMPGAPGVKGPPGMHGPPGPVGLPGVGKPGVTGFPGPQGPLGKPGAPGEPGPQGPIGVPGVQGPPGIPGIGKPGQDGIPGQPGFPGGKGEQGLPGLPGPPGLPGIGKPGFPGPKGDRGMGGVPGALGPRGEKGPIGAPGIGGPPGEPGLPGIPGPMGPPGAIGFPGPKGEGGIVGPQGPPGPKGEPGLQGFPGKPGFLGEVGPPGMRGLPGPIGPKGEAGQKGVPGLPGVPGLLGPKGEPGIPGDQGLQGPPGIPGIGGPSGPIGPPGIPGPKGEPGLPGPPGFPGIGKPGVAGLHGPPGKPGALGPQGQPGLPGPPGPPGPPGPP

SEQ ID NO: 552 - protein, 460 aa, Homo sapiens
GEPGPPGKPGPRGPPGPPGFPGKPGMGKPGLHGQPGPAGPPGFSRMGKAGPPGLPGKVGPPGQPGLRGEPGIRGDQGLRGPPGPPGLPGPSGITIPGKPGAQGVPGPPGFQGEPGPQGEPGPPGDRGLKGDNGVGQPGLPGAPGQGGAPGPPGLPGPAGLGKPGLDGLPGAPGDKGESGPPGVPGPRGEPGAVGPKGPPGVDGVGVPGAAGLPGPQGPSGAKGEPGTRGPPGLIGPTGYGMPGLPGPKGDRGPAGVPGLLGDRGEPGEDGEPGEQGPQGLGGPPGLPGSAGLPGRRGPPGPKGEAGPGGPPGVPGIRGDQGPSGLAGKPGVPGERGLPGAHGPPGPTGPKGEPGFTGRPGGPGVAGALGQKGDLGLPGQPGLRGPSGIPGLQGPAGPIGPQGLPGLKGEPGLPGPPGEGRAGEPGTAGPTGPPGVPGSPGITGPPGPPGPPGPPGAPGAF

SEQ ID NO: 553 - protein, 633 aa, Homo sapiens
GPPGEQGPPGPPGPPGVPGIDGIDGDRGPKGPPGPPGPAGEPGKPGAPGKPGTPGADGLTGPDGSPGSIGSKGQKGEPGVPGSRGFPGRGIPGPPGPPGTAGLPGELGRVGPVGDPGRRGPPGPPGPPGPRGTIGFHDGDPLCPNACPPGRSGYPGLPGMRGHKGAKGEIGEPGRQGHKGEEGDQGELGEVGAQGPPGAQGLRGITGIVGDKGEKGARGLDGEPGPQGLPGAPGDQGQRGPPGEAGPKGDRGAEGARGIPGLPGPKGDTGLPGVDGRDGIPGMPGTKGEPGKPGPPGDAGLQGLPGVPGIPGAKGVAGEKGSTGAPGKPGQMGNSGKPGQQGPPGEVGPRGPQGLPGSRGELGPVGSPGLPGKLGSLGSPGLPGLPGPPGLPGMKGDRGVVGEPGPKGEQGASGEEGEAGERGELGDIGLPGPKGSAGNPGEPGLRGPEGSRGLPGVEGPRGPPGPRGVQGEQGATGLPGVQGPPGRAPTDQHIKQVCMRVIQEHFAEMAASLKRPDSGATGLPGRPGPPGPPGPPGENGFPGQMGIRGLPGIKGPPGALGLRGPKGDLGEKGERGPPGRGPNGLPGAIGLPGDPGPASYGRNGRDGERGPPGVAGIPGVPGPPGPPGLPGFC

SEQ ID NO: 554 - protein, 484 aa, Homo sapiens
GMKGPPGLQGVKGHAGKRGILGDPGHQGKPGPKGDVGASGEQGIPGPPGPQGIRGYPGMAGPKGETGPHGYKGMVGAIGATGPPGEEGPRGPPGRAGEKGDEGSPGIRGPQGITGPKGATGPPGINGKDGTPGTPGMKGSAGQAGQPGSPGHQGLAGVPGQPGTKGGPGDQGEPGPQGLPGFSGPPGKEGEPGPRGEIGPQGIMGQKGDQGERGPVGQPGPQGRQGPKGEQGPPGIPGPQGLPGVKGDKGSPGKTGPRGKVGDPGVAGLPGEKGEKGESGEPGPKGQQGVRGEPGYPGPSGDAGAPGVQGYPGPPGPRGLAGNRGVPGQPGRQGVEGRDATDQHIVDVALKMLQEQLAEVAVSAKREALGAVGMMGPPGPPGPPGYPGKQGPHGHPGPRGVPGIVGAVGQIGNTGPKGKRGEKGDPGEVGRGHPGMPGPPGIPGLPGRPGQAINGKDGDRGSPGAPGEAGRPGLPGPVGLPGFC

SEQ ID NO: 555 - protein, 634 aa, Homo sapiens
GLPGPPGPPGPPGKPGQDGIDGEAGPPGLPGPPGPKGAPGKPGKPGEAGLPGLPGVDGLTGRDGPPGPKGAPGERGSLGPPGPPGLGGKGLPGPPGEAGVSGPPGGIGLRGPPGPSGLPGLPGPPGPPGPPGHPGVLPEGATDLQCPSICPPGPPGPPGMPGFKGPTGYKGEQGEVGKDGEKGDPGPPGPAGLPGSVGLQGPRGLRGLPGPLGPPGDRGPIGFRGPPGIPGAPGKAGDRGERGPEGFRGPKGDLGRPGPKGTPGVAGPSGEPGMPGKDGQNGVPGLDGQKGEAGRNGAPGEKGPNGLPGLPGRAGSKGEKGERGRAGELGEAGPSGEPGVPGDAGMPGERGEAGHRGSAGALGPQGPPGAPGVRGFQGQKGSMGDPGLPGPQGLRGDVGDRGPGGAAGPKGDQGIAGSDGLPGDKGELGPSGLVGPKGESGSRGELGPKGTQGPNGTSGVQGVPGPPGPLGLQGVPGVPGITGKPGVPGKEASEQRIRELCGGMISEQIAQLAAHLRKPLAPGSIGRPGPAGPPGPPGPPGSIGHPGARGPPGYRGPTGELGDPGPRGNQGDRGDKGAAGAGLDGPEGDQGPQGPQGVPGTSKDGQDGAPGEPGPPGDPGLPGAIGAQGTPGIC

SEQ ID NO: 556 - protein, 463 aa, Homo sapiens
GEQGTPGPPGPAGPRGHPGPSGPPGKPGYGSPGLQGEPGLPGPPGPSAVGKPGVPGLPGKPGERGPYGPKGDVGPAGLPGPRGPPGPPGIPGPAGISVPGKPGQQGPTGAPGPRGFPGEKGAPGVPGMNGQKGEMGYGAPGRPGERGLPGPQGPTGPSGPPGVGKRGENGVPGQPGIKGDRGFPGEMGPIGPPGPQGPPGERGPEGIGKPGAAGAPGQPGIPGTKGLPGAPGIAGPPGPPGFGKPGLPGLKGERGPAGLPGGPGAKGEQGPAGLPGKPGLTGPPGNMGPQGPKGIPGSHGLPGPKGETGPAGPAGYPGAKGERGSPGSDGKPGYPGKPGLDGPKGNPGLPGPKGDPGVGGPPGLPGPVGPAGAKGMPGHNGEAGPRGAPGIPGTRGPIGPPGIPGFPGSKGDPGSPGPPGPAGIATKGLNGPTGPPGPPGPRGHSGEPGLPGPPGPPGPPGQA

SEQ ID NO: 557 - protein, 1014 aa, Homo sapiens
GPPGPMGLTGRPGPVGGPGSSGAKGESGDPGPQGPRGVQGPPGPTGKPGKRGRPGADGGRGMPGEPGAKGDRGFDGLPGLPGDKGHRGERGPQGPPGPPGDDGMRGEDGEIGPRGLPGEAGPRGLLGPRGTPGAPGQPGMAGVDGPPGPKGNMGPQGEPGPPGQQGNPGPQGLPGPQGPIGPPGEKGPQGKPGLAGLPGADGPPGHPGKEGQSGEKGALGPPGPQGPIGYPGPRGVKGADGVRGLKGSKGEKGEDGFPGFKGDMGLKGDRGEVGQIGPRGEDGPEGPKGRAGPTGDPGPSGQAGEKGKLGVPGLPGYPGRQGPKGSTGFPGFPGANGEKGARGVAGKPGPRGQRGPTGPRGSRGARGPTGKPGPKGTSGGDGPPGPPGERGPQGPQGPVGFPGPKGPPGPPGKDGLPGHPGQRGETGFQGKTGPPGPGGVVGPQGPTGETGPIGERGHPGPPGPPGEQGLPGAAGKEGAKGDPGPQGISGKDGPAGLRGFPGERGLPGAQGAPGLKGGEGPQGPPGPVGSPGERGSAGTAGPIGLPGRPGPQGPPGPAGEKGAPGEKGPQGPAGRDGVQGPVGLPGPAGPAGSPGEDGDKGEIGEPGQKGSKGDKGENGPPGPPGLQGPVGAPGIAGGDGEPGPRGQQGMFGQKGDEGARGFPGPPGPIGLQGLPGPPGEKGENGDVGPMGPPGPPGPRGPQGPNGADGPQGPPGSVGSVGGVGEKGEPGEAGNPGPPGEAGVGGPKGERGEKGEAGPPGAAGPPGAKGPPGDDGPKGNPGPVGFPGDPGPPGEPGPAGQDGVGGDKGEDGDPGQPGPPGPSGEAGPPGPPGKRGPPGAAGAEGRQGEKGAKGEAGAEGPPGKTGPVGPQGPAGKPGPEGLRGIPGPVGEQGLPGAAGQDGPPGPMGPPGLPGLKGDPGSKGEKGHPGLIGLIGPPGEQGEKGDRGLPGTQGSPGAKGDGGIPGPAGPLGPPGPPGLPGPQGPKGNKGSTGPAGQKGDSGLPGPPGSPGPPGEV

SEQ ID NO: 558 - protein, 1014 aa, Homo sapiens
GPPGPMGYTGRPGPLGQPGSPGLKGESGDLGPQGPRGPQGLTGPPGKAGRRGRAGADGARGMPGDPGVKGDRGFDGLPGLPGEKGHRGDTGAQGLPGPPGEDGERGDDGEIGPRGLPGESGPRGLLGPKGPPGIPGPPGVRGMDGPQGPKGSLGPQGEPGPPGQQGTPGTQGLPGPQGAIGPHGEKGPQGKPGLPGMPGSDGPPGHPGKEGPPGTKGNQGPSGPQGPLGYPGPRGVKGVDGIRGLKGHKGEKGEDGFPGFKGDIGVKGDRGEVGVPGSRGEDGPEGPKGRTGPTGDPGPPGLMGEKGKLGVPGLPGYPGRQGPKGSLGFPGFPGASGEKGARGLSGKSGPRGERGPTGPRGQRGPRGATGKSGAKGTSGGDGPHGPPGERGLPGPQGPNGFPGPKGPPGPPGKDGLPGHPGQRGEVGFQGKTGPPGPPGVVGPQGAAGETGPMGERGHPGPPGPPGEQGLPGTAGKEGTKGDPGPPGAPGKDGPAGLRGFPGERGLPGTAGGPGLKGNEGPSGPPGPAGSPGERGAAGSGGPIGPPGRPGPQGPPGAAGEKGVPGEKGPIGPTGRDGVQGPVGLPGPAGPPGVAGEDGDKGEVGDPGQKGTKGNKGEHGPPGPPGPIGPVGQPGAAGADGEPGARGPQGHFGAKGDEGTRGFNGPPGPIGLQGLPGPSGEKGETGDVGPMGPPGPPGPRGPAGPNGADGPQGPPGGVGNLGPPGEKGEPGESGSPGIQGEPGVKGPRGERGEKGESGQPGEPGPPGPKGPTGDDGPKGNPGPVGFPGDPGPPGEGGPRGQDGAKGDRGEDGEPGQPGSPGPTGENGPPGPLGKRGPAGSPGSEGRQGGKGAKGDPGAIGAPGKTGPVGPAGPAGKPGPDGLRGLPGSVGQQGRPGATGQAGPPGPVGPPGLPGLRGDAGAKGEKGHPGLIGLIGPPGEQGEKGDRGLPGPQGSPGQKGEMGIPGASGPIGPGGPPGLPGPAGPKGAKGATGPGGPKGEKGVQGPPGHPGPPGEV

SEQ ID NO: 559 - protein, 152 aa, Homo sapiens
GPPGPPGPAGGPGAKGPRGERGISGAIGPPGPRGDIGPPGPQGPPGPQGPNGLSIPGEQGRQGMKGDAGEPGLPGRTGTPGLPGPPGPMGPPGDRGFTGKDGAMGPRGPPGPPGSPGSPGVTGPSGKPGKPGDHGRPGPSGLKGEKGDRGDI

SEQ ID NO: 560 - protein, 103 aa, Homo sapiens
GPPGPPGPPGSAGARGEPGPGGRPGFPGTPGMQGPPGERGLPGEKGERGTGSSGPRGLPGPPGPQGESRTGPPGSTGSRGPPGPPGRPGNSGIRGPPGPPGYC

SEQ ID NO: 561 - protein, 95 aa, Homo sapiens
GPPGPTGRPGLPGDKGAIGMPGRVGSPGDAGLSIIGPRGPPGQPGTRGFPGFPGPIGLDGKPGHPGPKGDMGLTGPPGQPGPQGQKGEKGQCGEY

SEQ ID NO: 562 - protein, 172 aa, Homo sapiens
GPPGPPGPPGPSGPLGHPGLPGPMGPPGLPGPPGPKGDPGIQGYHGRKGERGMPGMPGKHGAKGAPGIAVAGMKGEPGIPGTKGEKGAEGSPGLPGLLGQKGEKGDAGNSIGGGRGEPGPPGLPGPPGPKGEAGVDGQVGPPGQPGDKGERGAAGEQGPDGPKGSKGEPGKG

SEQ ID NO: 563 - protein, 236 aa, Homo sapiens
GPPGLPGQIGPPGAPGIPGQKGEIGLPGPPGHDGEKGPRGKPGDMGPPGPQGPPGKDGPPGVKGENGHPGSPGEKGEKGETGQAGSPGEKGEAGEKGNPGAEVPGLPGPEGPPGPPGLQGVPGPKGEAGLDGAKGEKGFQGEKGDRGPLGLPGASGLDGRPGPPGTPGPIGVPGPAGPKGERGSKGDPGMTGPTGAAGLPGLHGPPGDKGNRGERGKKGSRGPKGDKGDQGAPGLD

SEQ ID NO: 564 - protein, 152 aa, Homo sapiens
VALGPAGPPGGPGLRGPKGQQGEPGPKGPDGPRGEIGLPGPQGPPGPQGPSGLSIQGMPGMPGEKGEKGDTGLPGPQGIPGGVGSPGRDGSPGQRGLPGKDGSSGPPGPPGPIGIPGTPGVPGITGSMGPQGALGPPGVPGAKGERGERGDL

SEQ ID NO: 565 - protein, 126 aa, Homo sapiens
GPPGEPGRPGSPGAPGEQGPPGTPGFPGNAGVPGTPGERGLTGIKGEKGNPGVGTQGPRGPPGPAGPSGESRPGSPGPPGSPGPRGPPGHLGVPGPQGPSGQPGYCDPSSCSAYGVRAPHPDQPEF

SEQ ID NO: 566 - protein, 514 aa, Homo sapiens
GPPGPPGPPGLPGIPGKPGTDVFMGPPGSPGEDGPAGEPGPPGPEGQPGVDGATGLPGMKGEKGARGPNGSVGEKGDPGNRGLPGPPGKKGQAGPPGVMGPPGPPGPPGPPGPGCTMGLGFEDTEGSGSTQLLNEPKLSRPTAAIGLKGEKGDRGPKGERGMDGASIVGPPGPRGPPGHIKVLSNSLINITHGFMNFSDIPELVGPPGPDGLPGLPGFPGPRGPKGDTGLPGFPGLKGEQGEKGEPGAILTEDIPLERLMGKKGEPGMHGAPGPMGPKGPPGHKGEFGLPGRPGRPGLNGLKGTKGDPGVIMQGPPGLPGPPGPPGPPGAVINIKGAIFPIPVRPHCKMPVDTAHPGSPELITFHGVKGEKGSWGLPGSKGEKGDQGAQGPPGPPLDLAYLRHFLNNLKGENGDKGFKGEKGEKGDINGSFLMSGPPGLPGNPGPAGQKGETVVGPQGPPGAPGLPGPPGFGRPGDPGPPGPPGPPGPPAILGAAVALPGPPGPPGQPGLPGSR

SEQ ID NO: 567 - protein, 1204 aa, Homo sapiens
GPKGEKGESGALGPSGLPGSTGEKGQKGEKGDGGIKGVPGKPGRDGRPGEICVIGPKGQKGDPGFVGPEGLAGEPGPPGLPGPPGIGLPGTPGDPGGPPGPKGDKGSSGIPGKEGPGGKPGKPGVKGEKGDPCEVCPTLPEGFQNFVGLPGKPGPKGEPGDPVPARGDPGIQGIKGEKGEPCLSCSSVVGAQHLVSSTGASGDVGSPGFGLPGLPGRAGVPGLKGEKGNFGEAGPAGSPGPPGPVGPAGIKGAKGEPCEPCPALSNLQDGDVRVVALPGPSGEKGEPGPPGFGLPGKQGKAGERGLKGQKGDAGNPGDPGTPGTTGRPGLSGEPGVQGPAGPKGEKGDGCTACPSLQGTVTDMAGRPGQPGPKGEQGPEGVGRPGKPGQPGLPGVQGPPGLKGVQGEPGPPGRGVQGPQGEPGAPGLPGIQGLPGPRGPPGPTGEKGAQGSPGVKGATGPVGPPGASVSGPPGRDGQQGQTGLRGTPGEKGPRGEKGEPGECSCPSQGDLIFSGMPGAPGLWMGSSWQPGPQGPPGIPGPPGPPGVPGLQGVPGNNGLPGQPGLTAELGSLPIEQHLLKSICGDCVQGQRAHPGYLVEKGEKGDQGIPGVPGLDNCAQCFLSLERPRAEEARGDNSEGDPGCVGSPGLPGPPGLPGQRGEEGPPGMRGSPGPPGPIGPPGFPGAVGSPGLPGLQGERGLTGLTGDKGEPGPPGQPGYPGATGPPGLPGIKGERGYTGSAGEKGEPGPPGSEGLPGPPGPAGPRGERGPQGNSGEKGDQGFQGQPGFPGPPGPPGFPGKVGSPGPPGPQAEKGSEGIRGPSGLPGSPGPPGPPGIQGPAGLDGLDGKDGKPGLRGDPGPAGPPGLMGPPGFKGKTGHPGLPGPKGDCGKPGPPGSTGRPGAEGEPGAMGPQGRPGPPGHVGPPGPPGQPGPAGISAVGLKGDRGATGERGLAGLPGQPGPPGHPGPPGEPGTDGAAGKEGPPGKQGFYGPPGPKGDPGAAGQKGQAGEKGRAGMPGGPGKSGSMGPVGPPGPAGERGHPGAPGPSGSPGLPGVPGSMGDMVNYDEIKRFIRQEIIKMFDERMAYYTSRMQFPMEMAAAPGRPGPPGKDGAPGRPGAPGSPGLPGQIGREGRQGLPGVRGLPGTKGEKGDIGIGIAGENGLPGPPGPQGPPGYGKMGATGPMGQQGIPGIPGPPGPMGQPGKAGHC

SEQ ID NO: 568 - protein, 916 aa, Homo sapiens
GSPGPKGDMGSPGPKGDRGFPGTPGIPGPLGHPGPQGPKGQKGSVGDPGMEGPMGQRGREGPMGPRGEAGPPGSGEKGERGAAGEPGPHGPPGVPGSVGPKGSSGSPGPQGPPGPVGLQGLRGEVGLPGVKGDKGPMGPPGPKGDQGEKGPRGLTGEPGMRGLPGAVGEPGAKGAMGPAGPDGHQGPRGEQGLTGMPGIRGPPGPSGDPGKPGLTGPQGPQGLPGTPGRPGIKGEPGAPGKIVTSEGSSMLTVPGPPGPPGAMGPPGPPGAPGPAGPAGLPGHQEVLNLQGPPGPPGPRGPPGPSIPGPPGPRGPPGEGLPGPPGPPGSFLSNSETFLSGPPGPPGPPGPKGDQGPPGPRGHQGEQGLPGFSTSGSSSFGLNLQGPPGPPGPQGPKGDKGDPGVPGALGIPSGPSEGGSSSTMYVSGPPGPPGPPGPPGSISSSGQEIQQYISEYMQSDSIRSYLSGVQGPPGPPGPPGPVTTITGETFDYSELASHVVSYLRTSGYGVSLFSSSISSEDILAVLQRDDVRQYLRQYLMGPRGPPGPPGASGDGSLLSLDYAELSSRILSYMSSSGISIGLPGPPGPPGLPGTSYEELLSLLRGSEFRGIVGPPGPPGPPGIPGNVWSSISVEDLSSYLHTAGLSFIPGPPGPPGPPGPRGPPGVSGALATYAAENSDSFRSELISYLTSPDVRSFIVGPPGPPGPQGPPGDSRLLSTDASHSRGSSSSSHSSSVRRGSSYSSSMSTGGGGAGSLGAGGAFGEAAGDRGPYGTDIGPGGGYGAAAEGGMYAGNGGLLGADFAGDLDYNELAVRVSESMQRQGLLQGMAYTVQGPPGQPGPQGPPGISKVFSAYSNVTADLMDFFQTYGAIQGPPGQKGEMGTPGPKGDRGPAGPPGHPGPPGPRGHKGEKGDKGDQ

SEQ ID NO: 569 - protein, 691 aa, Homo sapiens
GLKGQKGEPGVPGPPGRAGPPGSPCLPGPPGLPCPVSPLGPAGPALQTVPGPQGPPGPPGRDGTPGRDGEPGDPGEDGKPGDTGPQGFPGTPGDVGPKGDKGDPGVGERGPPGPQGPPGPPGPSFRHDKLTFIDMEGSGFGGDLEALRGPRGFPGPPGPPGVPGLPGEPGRFGVNSSDVPGPAGLPGVPGREGPPGFPGLPGPPGPPGREGPPGRTGQKGSLGEAGAPGHKGSKGAPGPAGARGESGLAGAPGPAGPPGPPGPPGPPGPGLPAGFDDMEGSGGPFWSTARSADGPQGPPGLPGLKGDPGVPGLPGAKGEVGADGVPGFPGLPGREGIAGPQGPKGDRGSRGEKGDPGKDGVGQPGLPGPPGPPGPVVYVSEQDGSVLSVPGPEGRPGFAGFPGPAGPKGNLGSKGERGSPGPKGEKGEPGSIFSPDGGALGPAQKGAKGEPGFRGPPGPYGRPGYKGEIGFPGRPGRPGMNGLKGEKGEPGDASLGFGMRGMPGPPGPPGPPGPPGTPVYDSNVFAESSRPGPPGLPGNQGPPGPKGAKGEVGPPGPPGQFPFDFLQLEAEMKGEKGDRGDAGQKGERGEPGGGGFFGSSLPGPPGPPGPPGPRGYPGIPGPKGESIRGQPGPPGPQGPPGIGYEGRQGPPGPPGPPGPPSFPGPHRQTISVPGPPGPPGPPGPPGTMGAS

SEQ ID NO: 570 - protein, 820 aa, Homo sapiens
GEAGLPGAPGSPGQKGHKGEPGENGLHGAPGFPGQKGEQGFEGSKGETGEKGEQGEKGDPALAGLNGENGLKGDLGPHGPPGPKGEKGDTGPPGPPALPGSLGIQGPQGPPGKEGQRGRRGKTGPPGKPGPPGPPGPPGIQGIHQTLGGYYNKDNKGNDEHEAGGLKGDKGETGLPGFPGSVGPKGQKGEPGEPFTKGEKGDRGEPGVIGSQGVKGEPGDPGPPGLIGSPGLKGQQGSAGSMGPRGPPGDVGLPGEHGIPGKQGIKGEKGDPGGIIGPPGLPGPKGEAGPPGKSLPGEPGLDGNPGAPGPRGPKGERGLPGVHGSPGDIGPQGIGIPGRTGAQGPAGEPGIQGPRGLPGLPGTPGTPGNDGVPGRDGKPGLPGPPGDPIALPLLGDIGALLKNFCGNCQASVPGLKSNKGEEGGAGEPGKYDSMARKGDIGPRGPPGIPGREGPKGSKGERGYPGIPGEKGDEGLQGIPGIPGAPGPTGPPGLMGRTGHPGPTGAKGEKGSDGPPGKPGPPGPPGIPFNERNGMSSLYKIKGGVNVPSYPGPPGPPGPKGDPGPVGEPGAMGLPGLEGFPGVKGDRGPAGPPGIAGMSGKPGAPGPPGVPGEPGERGPVGDIGFPGPEGPSGKPGINGKDGIPGAQGIMGKPGDRGPKGERGDQGIPGDRGSQGERGKPGLTGMKGAIGPMGPPGNKGSMGSPGHQGPPGSPGIPGIPADAVSFEEIKKYINQEVLRIFEERMAVFLSQLKLPAAMLAAQAYGRPGPPGKDGLPGPPGDPGPQGYRGQKGERGEPGIGLPGSPGLPGTSALGLPGSPGAP

SEQ ID NO: 571 - protein, 120 aa, Homo sapiens
GPPGPQGPPGLPGRNGTPGEQGFPGPRGPPGVKGEKGDHGLPGLQGHPGHQGIPGRVGLQGPKGMRGLEGTAGLPGPPGPRGFQGMAGARGTSGERGPPGTVGPTGLPGPKGERGEKGEP

SEQ ID NO: 572 - protein, 434 aa, Homo sapiens
GKPGLQGPKGDPGLPGNPGYPGQPGQDGKPGYQGIAGTPGVPGSPGIQGARGLPGYKGEPGRDGDKGDRGLPGFPGLHGMPGSKGEMGAKGDKGSPGFYGKKGAKGEKGNAGFPGLPGPAGEPGRHGKDGLMGSPGFKGEAGSPGAPGQDGTRGEPGIPGFPGNRGLMGQKGEIGPPGQQGKKGAPGMPGLMGSNGSPGQPGTPGSKGSKGEPGIQGMPGASGLKGEPGATGSPGEPGYMGLPGIQGKKGDKGNQGEKGIQGQKGENGRQGIPGQQGIQGHHGAKGERGEKGEPGVRGAIGSKGESGVDGLMGPAGPKGQPGDPGPQGPPGLDGKPGREFSEQFIRQVCTDVIRAQLPVLLQSGRIRNCDHCLSQHGSPGIPGPPGPIGPEGPRGLPGLPGRDGVPGLVGVPGRPGVRGLKGLPGRNGEKGSQG

SEQ ID NO: 573 - protein, 1125 aa, Homo sapiens
GEKGEMGVAGPMGLPGPKGDIGAIGPVGAPGPKGEKGDVGIGPFGQGEKGEKGSLGLPGPPGRDGSKGMRGEPGELGEPGLPGEVGMRGPQGPPGLPGPPGRVGAPGLQGERGEKGTRGEKGERGLDGFPGKPGDTGQQGRPGPSGVAGPQGEKGDVGPAGPPGVPGSVVQQEGLKGEQGAPGPRGHQGAPGPPGARGPIGPEGRDGPPGLQGLRGKKGDMGPPGIPGLLGLQGPPGPPGVPGPPGPGGSPGLPGEIGFPGKPGPPGPTGPPGKDGPNGPPGPPGTKGEPGERGEDGLPGKPGLRGEIGEQGLAGRPGEKGEAGLPGAPGFPGVRGEKGDQGEKGELGLPGLKGDRGEKGEAGPAGPPGLPGTTSLFTPHPRMPGEQGPKGEKGDPGLPGEPGLQGRPGELGPQGPTGPPGAKGQEGAHGAPGAAGNPGAPGHVGAPGPSGPPGSVGAPGLRGTPGKDGERGEKGAAGEEGSPGPVGPRGDPGAPGLPGPPGKGKDGEPGLRGSPGLPGPLGTKAACGKVRGSENCALGGQCVKGDRGAPGIPGSPGSRGDPGIGVAGPPGPSGPPGDKGSPGSRGLPGFPGPQGPAGRDGAPGNPGERGPPGKPGLSSLLSPGDINLLAKDVCNDCPPGPPGLPGLPGFKGDKGVPGKPGREGTEGKKGEAGPPGLPGPPGIAGPQGSQGERGADGEVGQKGDQGHPGVPGFMGPPGNPGPPGADGIAGAAGPPGIQGSPGKEGPPGPQGPSGLPGIPGEEGKEGRDGKPGPPGEPGKAGEPGLPGPEGARGPPGFKGHTGDSGAPGPRGESGAMGLPGQEGLPGKDGDTGPTGPQGPQGPRGPPGKNGSPGSPGEPGPSGTPGQKGSKGENGSPGLPGFLGPRGPPGEPGEKGVPGKEGVPGKPGEPGFKGERGDPGIKGDKGPPGGKGQPGDPGIPGHKGHTGLMGPQGLPGENGPVGPPGPPGQPGFPGLRGESPSMETLRRLIQEELGKQLETRLAYLLAQMPPAYMKSSQGRPGPPGPPGKDGLPGRAGPMGEPGRPGQGGLEGPSGPIGPKGERGAKGDPGAPGVGLRGEMGPPGIPGQPGEPGYAKDGLPGIPGPQGETGPAGHPGLPGPPGPPGQC

SEQ ID NO: 574 - protein, 399 aa, Homo sapiens
GRRGKPGRRGDPGPPGQSGRDGYPGPLGLDGKPGLPGPKGEKGAPGDFGPRGDQGQDGAAGPPGPPGPPGARGPPGDTGKDGPRGAQGPAGPKGEPGQDGEMGPKGPPGPKGEPGVPGKKGDDGTPSQPGPPGPKGEPGSMGPRGENGVDGAPGPKGEPGHRGTDGAAGPRGAPGLKGEQGDTVVIDYDGRILDALKGPPGPQGPPGPPGIPGAKGELGLPGAPGIDGEKGPKGQKGDPGEPGPAGLKGEAGEMGLSGLPGADGLKGEKGESASDSLQESLAQLIVEPGPPGPPGPPGPMGLQGIQGPKGLDGAKGEKGASGERGPSGLPGPVGPPGLIGLPGTKGEKGRPGEPGLDGFPGPRGEKGDRSERGEKGERGVPGRKGVKGQKGEPGPPGLD

SEQ ID NO: 575 - protein, 991 aa, Homo sapiens
GPKGDTGPPGPPGPAGIPGPSGKRGPRGIPGPHGNPGLPGLPGPKGPKGDPGFSPGQPVPGEKGDQGLSGLMGPPGMQGDKGLKGHPGLPGLPGEQGIPGFAGNIGSPGYPGRQGLAGPEGNPGPKGAQGFIGSPGEAGQLGPEGERGIPGIRGKKGFKGRQGFPGDFGDRGPAGLDGSPGLVGGTGPPGFPGLRGSVGPVGPIGPAGIPGPMGLSGNKGLPGIKGDKGEQGTAGELGEPGYPGDKGAVGLPGPPGMRGKSGPSGQTGDPGLQGPSGPPGPEGFPGDIGIPGQNGPEGPKGLLGNRGPPGPPGLKGTQGEEGPIGAFGELGPRGKPGQKGYAGEPGPEGLKGEVGDQGNIGKIGETGPVGLPGEVGMTGSIGEKGERGSPGPLGPQGEKGVMGYPGPPGVPGPIGPLGLPGHVGARGPPGSQGPKGQRGSRGPDGLLGEQGIQGAKGEKGDQGKRGPHGLIGKTGNPGERGFQGKPGLQGLPGSTGDRGLPGEPGLRGLQGDVGPPGEMGMEGPPGTEGESGLQGEPGAKGDVGTAGSVGGTGEPGLRGEPGAPGEEGLQGKDGLKGVPGGRGLPGEDGEKGEMGLPGIIGPLGRSGQTGLPGPEGIVGIPGQRGRPGKKGDKGQIGPTGEVGSRGPPGKIGKSGPKGARGTRGAVGHLGLMGPDGEPGIPGYRGHQGQPGPSGLPGPKGEKGYPGEDSTVLGPPGPRGEPGPVGDQGERGEPGAEGYKGHVGVPGLRGATGQQGPPGEPGDQGEQGLKGERGSEGNKGKKGAPGPSGKPGIPGLQGLLGPKGIQGYHGADGISGNPGKIGPPGKQGLPGIRGGPGRTGLAGAPGPPGVKGSSGLPGSPGIQGPKGEQGLPGQPGIQGKRGHRGAQGDQGPCGDPGLKGQPGEYGVQGLTGFQGFPGPKGPEGDAGIVGISGPKGPIGHRGNTGPLGREGIIGPTGRTGPRGEKGFRGETGPQGPRGQPGPPGPPGAPGPR

SEQ ID NO: 576 - protein, 508 aa, Homo sapiens
GPPGKRGKRGRRGESGPPGQPGPQGPPGPKGDKGEQGDQGPRMVFPKINHGFLSADQQLIKRRLIKGDQGQAGPPGPPGPPGPRGPPGDTGKDGPRGMPGVPGEPGKPGEQGLMGPLGPPGQKGSIGAPGIPGMNGQKGEPGLPGAVGQNGIPGPKGEPGEQGEKGDAGENGPKGDTGEKGDPGSSAAGIKGEPGESGRPGQKGEPGLPGLPGLPGIKGEPGFIGPQGEPGLPGLPGTKGERGEAGPPGRGERGEPGAPGPKGKQGESGTRGPKGSKGDRGEKGDSGAQGPRGPPGQKGDQGATEIIDYNGNLHEALQRITTLTVTGPPGPPGPQGLQGPKGEQGSPGIPGMDGEQGLKGSKGDMGDPGMTGEKGGIGLPGLPGANGMKGEKGDSGMPGPQGPSIIGPPGPPGPHGPPGPMGPHGLPGPKGTDGPMGPHGPAGPKGERGEKGAMGEPGPRGPYGLPGKDGEPGLDGFPGPRGEKGDLGEKGEKGFRGVKGEKGEPGQP

SEQ ID NO: 577 - protein, 69 aa, Homo sapiens
GPAGPPGQTGPPGPAGPPGSKGDRGQTGEKGPAGPPGLLGPPGPRGLPGEMGRPGPPGPPGPAGNPGPS

SEQ ID NO: 578 - protein, 54 aa, Homo sapiens
GVPGPRGPPGPPGPPGPRGPPGPPGTPGSQGLAGERGTVGPSGEPGVKGEEGEK

SEQ ID NO: 579 - protein, 994 aa, Homo sapiens
GPPGPKGDCGLPGPPGLPGLPGIPGARGPRGPPGPYGNPGLPGPPGAKGQKGDPGLSPGKAHDGAKGDMGLPGLSGNPGPPGRKGHKGYPGPAGHPGEQGQPGPEGSPGAKGYPGRQGLPGPVGDPGPKGSRGYIGLPGLFGLPGSDGERGLPGVPGKRGKMGMPGFPGVFGERGPPGLDGNPGELGLPGPPGVPGLIGDLGVLGPIGYPGPKGMKGLMGSVGEPGLKGDKGEQGVPGVSGDPGFQGDKGSQGLPGFPGARGKPGPLGKVGDKGSIGFPGPPGPEGFPGDIGPPGDNGPEGMKGKPGARGLPGPRGQLGPEGDEGPMGPPGAPGLEGQPGRKGFPGRPGLDGVKGEPGDPGRPGPVGEQGFMGFIGLVGEPGIVGEKGDRGMMGPPGVPGPKGSMGHPGMPGGMGTPGEPGPQGPPGSRGPPGMRGAKGRRGPRGPDGPAGEQGSRGLKGPPGPQGRPGRPGQQGVAGERGHLGSRGFPGIPGPSGPPGTKGLPGEPGPQGPQGPIGPPGEMGPKGPPGAVGEPGLPGEAGMKGDLGPLGTPGEQGLIGQRGEPGLEGDSGPMGPDGLKGDRGDPGPDGEHGEKGQEGLMGEDGPPGPPGVTGVRGPEGKSGKQGEKGRTGAKGAKGYQGQLGEMGVPGDPGPPGTPGPKGSRGSLGPTGAPGRMGAQGEPGLAGYDGHKGIVGPLGPPGPKGEKGEQGEDGKAEGPPGPPGDRGPVGDRGDRGEPGDPGYPGQEGVQGLRGKPGQQGQPGHPGPRGWPGPKGSKGAEGPKGKQGKAGAPGRRGVQGLQGLPGPRGVVGRQGLEGIAGPDGLPGRDGQAGQQGEQGDDGDPGPMGPAGKRGNPGVAGLPGAQGPPGFKGESGLPGQLGPPGKRGTEGRTGLPGNQGEPGSKGQPGDSGEMGFPGMAGLFGPKGPPGDIGFKGIQGPRGPPGLMGKEGIVGPLGILGPSGLPGPKGDKGSRGDWGLQGPRGPPGPRGRPGPPGPP

SEQ ID NO: 580 - protein, 530 aa, Homo sapiens
GDPGDPGPPGTHGNPGIKGERGPKGNPGNAQKGEAGERGPGGIPGYKGDKGERGECGKPGIKGDKGSPGPYGPKGPRGIQGITGPPGDPGPKGFQGNKGEPGPPGPYGSPGAPGIGQQGIKGERGQEGRPGAPGPIGVGEPGQPGPRGPEGVPGERGLPGEGFPGPKGEKGSEGPTGPQGLQGLSIKGEKGDIGPVGPQGPMGIPGIGSQGEQGIQGPIGPPGPQGPAGQGLPGSKGEVGQMGPTGPRGPVGIGVQGPKGEPGSIGLPGQPGVPGEDGAAGKKGEAGLPGARGPEGPPGKGQPGPKGDEGKKGSKGNQGQRGLPGPEGPKGEPGIMGPFGMPGTSIPGPPGPKGDRGGPGIPGFKGEPGLSIRGPKGVQGPRGPVGAPGLKGDGYPGVPGPRGLPGPPGPMGLRGVGDTGAKGEPGVRGPPGPSGPRGVGTQGPKGDTGQKGLPGPPGPPGYGSQGIKGEQGPQGFPGPKGTMGHGLPGQKGEHGERGDVGKKGDKGEIGEPGSPGKQGLQGPKGDLGLT

SEQ ID NO: 581 - protein, 79 aa, Homo sapiens
GKKGEAGRPGRRGRPGLKGEQGEPGAPGIRTGIQGLKGDQGEPGPSGNPGKVGYPGPSGPLGARGIPGIKGTKGSPGNI

SEQ ID NO: 582 - protein, 84 aa, Homo sapiens
GPPAIPGIPGIPGTPGPDGQPGTPGIKGEKGLPGLAGDHGEFGEKGDPGIPGNPGKVGPKGPMGPKGGPGAPGAPGPKGESGDY

SEQ ID NO: 583 - protein, 84 aa, Homo sapiens
GCYGIPGMPGLPGAPGKDGYDGLPGPKGEPGIPAIPGIRGPKGQKGEPGLPGHPGKNGPMGPPGMPGVPGPMGIPGEPGEEGRY

SEQ ID NO: 584 - protein, 51 aa, Homo sapiens
GPQGKPGRTGKPGPPGPPGDPGPPGPVGPPGEKGEPGKPGPPGLPGAGGSG

SEQ ID NO: 585 - protein, 45 aa, Homo sapiens
GPKGDPGRPGKPGPRGPPGEPGPPGPRGPPGEKGDSGRPGLPGLQ

SEQ ID NO: 586 - protein, 51 aa, Homo sapiens
GPKGEAGRPGKAGPRGPPGEPGPPGPMGPPGEKGEPGRQGLPGPPGAPGLN

SEQ ID NO: 587 - protein, 47 aa, Homo sapiens
GAKGEVGRRGKAGLRGPPGPPGPRGPPGEPGRPGPPGPPGPGPGGVA

SEQ ID NO: 588 - protein, 42 aa, Homo sapiens
GEKGDRGDRGLQGKYGKTGSAGARGHTGPKGQKGSMGAPGER

SEQ ID NO: 589 - protein, 102 aa, Homo sapiens
GPQGPPGPPGAPGPSGMMGRMGFPGKDGQDGHDGDRGDSGEEGPPGRTGNRGKPGPKGKAGAIGRAGPRGPKGVNGTPGKHGTPGKKGPKGKKGEPGLPGPC

SEQ ID NO: 590 - protein, 63 aa, Homo sapiens
GYQGPPGPPGPPGIPGNHGNNGNNGATGHEGAKGEKGDKGDLGPRGERGQHGPKGEKGYPGIP

SEQ ID NO: 591 - protein, 69 aa, Homo sapiens
GHPGLPGTPGHHGSQGLPGRDGRDGRDGAPGAPGEKGEGGRPGLPGPRGDPGPRGEAGPAGPTGPAGEC

SEQ ID NO: 592 - protein, 42 aa, Homo sapiens
GDKGDPGPMGLPGYMGREGPQGEPGPQGSKGDKGEMGSPGAP

SEQ ID NO: 593 - protein, 102 aa, Homo sapiens
GLPGPPGPPGANGSPGPHGRIGLPGRDGRDGRKGEKGEKGTAGLRGKTGPLGLAGEKGDQGETGKKGPIGPEGEKGEVGPIGPPGPKGDRGEQGDPGLPGVC

SEQ ID NO: 594 - protein, 42 aa, Homo sapiens
GEKGEAGVRGRAGRSGKEGPPGARGLQGRRGQKGQVGPPGAA

SEQ ID NO: 595 - protein, 171 aa, Homo sapiens
GHPGIPGNPGHNGLPGRDGRDGAKGDKGDAGEPGRPGSPGKDGTSGEKGERGADGKVEAKGIKGDQGSRGSPGKHGPKGLAGPMGEKGLRGETGPQGQKGNKGDVGPTGPEGPRGNIGPLGPTGLPGPMGPIGKPGPKGEAGPTGPQGEPGVRGIRGWKGDRGEKGKIGET

SEQ ID NO: 596 - protein, 171 aa, Homo sapiens
GHPGIPGNPGHNGLPGRDGRDGAKGDKGDAGEPGCPGSPGKDGTSGEKGERGADGKVEAKGIKGDQGSRGSPGKHGPKGLAGPMGEKGLRGETGPQGQKGNKGDVGPTGPEGPRGNIGPLGPTGLPGPMGPIGKPGPKGEAGPTGPQGEPGVRGIRGWKGDRGEKGKIGET

SEQ ID NO: 597 - protein, 66 aa, Homo sapiens
GIPGHPGHNGAPGRDGRDGTPGEKGEKGDPGLIGPKGDIGETGVPGAEGPRGFPGIQGRKGEPGEG

SEQ ID NO: 598 - protein, 222 aa, Homo sapiens
GETGQPGPKGEAGNLGIPGPPGVVGPQGPRGYKGEKGLKGERGDQGVPGYPGKPGAQGEPGPKGDKGNIGLGGVKGQKGSKGDTCGNCTKGEKGDQGAMGSPGLHGGPGAKGEKGEMGEKGEMGDKGCCGDSGERGGKGQKGEGGMKGEKGSKGDSGMEGKSGRNGLPGAKGDPGIKGEKGELGPPGLLGPTGPKGDIGNKGVRGPTGKKGSRGFKGSKGEL

SEQ ID NO: 599 - protein, 51 aa, Homo sapiens
GPAGEAGPPGPPGLQGPPGPAGPPGSPGKDGQEGPIGPPGPQGEQGVEGAP

SEQ ID NO: 600 - protein, 190 aa, Homo sapiens
GPPPAQGSPGDGGLQDQVGAWGLPGPTGPKGDAGSRGPMGMRGPPGPQGPPGSPGRAGAVGTPGERGPPGPPGPPGPPGPPAPVGPPHARISQHGDPLLSNTFTETNNHWPQGPTGPPGPPGPMGPPGPPGPTGVPGSPGHIGPPGPTGPKGISGHPGEKGERGLRGEPGPQGSAGQRGEPGPKGDPGEK

SEQ ID NO: 601 - protein, 59 aa, Homo sapiens
GINGFPGKDGRDGTKGEKGEPGQGLRGLQGPPGKLGPPGNPGPSGSPGPKGQKGDPGKS

SEQ ID NO: 602 - protein, 73 aa, Homo sapiens
GSPGIPGTPGSHGLPGRDGRDGLKGDPGPPGPMGPPGEMPCPPGNDGLPGAPGIPGECGEKGEPGERGPPGLP

SEQ ID NO: 603 - protein, 73 aa, Homo sapiens
GSPGIPGTPGSHGLPGRDGRDGVKGDPGPPGPMGPPGETPCPPGNNGLPGAPGVPGERGEKGEAGERGPPGLP

SEQ ID NO: 604 - protein, 177 aa, Homo sapiens
GLPGRDGRDGREGPRGEKGDPGLPGAAGQAGMPGQAGPVGPKGDNGSVGEPGPKGDTGPSGPPGPPGVPGPAGREGPLGKQGNIGPQGKPGPKGEAGPKGEVGAPGMQGSAGARGLAGPKGERGVPGERGVPGNAGAAGSAGAMGPQGSPGARGPPGLKGDKGIPGDKGAKGESGLP

SEQ ID NO: 605 - protein, 66 aa, Homo sapiens
GEKGDPGEEGKHGKVGRMGPKGIKGELGDMGDQGNIGKTGPIGKKGDKGEKGLLGIPGEKGKAGTV

SEQ ID NO: 606 - protein, 72 aa, Homo sapiens
GLKGDAGEKGDKGAPGRPGRVGPTGEKGDMGDKGQKGSVGRHGKIGPIGSKGEKGDSGDIGPPGPNGEPGLP

SEQ ID NO: 607 - protein, 57 aa, Homo sapiens
GCPGLPGAPGPKGEAGVIGERGERGLPGAPGKAGPVGPKGDRGEKGMRGEKGDAGQS

SEQ ID NO: 608 - protein, 45 aa, Homo sapiens
GCPGLPGAPGPKGEAGTNGKRGERGPPGPPGKAGPPGPNGAPGEP

SEQ ID NO: 609 - protein, 33 aa, Homo sapiens
GAPGSPGEKGAPGPQGPPGPPGKMGPKGEPGDP

SEQ ID NO: 610 - protein, 69 aa, Homo sapiens
GPPGPPGEKGDRGPTGESGPRGFPGPIGPPGLKGDRGAIGFPGSRGLPGYAGRPGNSGPKGQKGEKGSG

SEQ ID NO: 611 - protein, 273 aa, Homo sapiens
GEQGAPGLQGHKGAMGMPGAPGPPGPPAEKGAKGAMGRDGATGPSGPQGPPGVKGEAGLQGPQGAPGKQGATGTPGPQGEKGSKGDGGLIGPKGETGTKGEKGDLGLPGSKGDRGMKGDAGVMGPPGAQGSKGDFGRPGPPGLAGFPGAKGDQGQPGLQGVPGPPGAVGHPGAKGEPGSAGSPGRAGLPGSPGSPGATGLKGSKGDTGLQGQQGRKGESGVPGPAGVKGEQGSPGLAGPKGAPGQAGQKGDQGVKGSSGEQGVKGEKGERGEN

SEQ ID NO: 612 - protein, 147 aa, Homo sapiens
GAPGPPGPRGFKGDMGVKGPVGGRGPKGDPGSLGPLGPQGPQGQPGEAGPVGERGPVGPRGFPGLKGSKGSFGTGGPRGQPGPKGDIGPPGPEGPPGSPGPSGPQGKPGIAGKTGSPGQRGAMGPKGEPGIQGPPGLPGPPGPPGSQ

SEQ ID NO: 613 - protein, 147 aa, Homo sapiens
GPPGPRGPRGDRGSQGPPGPTGNKGQKGEKGEPGPPGPAGERGPIGPAGPPGERGGKGSKGSQGPKGSRGSPGKPGPQGSSGDPGPPGPPGKEGLPGPQGPPGFQGLQGTVGEPGVPGPRGLPGLPGVPGMPGPKGPPGPPGPSGAV

SEQ ID NO: 614 - protein, 75 aa, Homo sapiens
GPPGPKGDQGDEGKEGRPGIPGLPGLRGLPGERGTPGLPGPKGDDGKLGATGPMGMRGFKGDRGPKGEKGEKGDR

SEQ ID NO: 615 - protein, 36 aa, Homo sapiens
GPAGVPGRDGSPGANGIPGTPGIPGRDGFKGEKGEC

SEQ ID NO: 616 - protein, 89 aa, Homo sapiens
GPPGLPGGQGPPGSPGPKGSPGFPGMPGPPGQPGPRGSMGPMGPSPDLSHIKQGRRGPVGPPGAPGRDGSKGERGAPGPRGSPGPPGSF

SEQ ID NO: 617 - protein, 154 aa, Homo sapiens
GPPGPQGQFRPPGPQGQMGPQGPPLHQGGGGPQGFMGPQGPQGPPQGLPRPQDMHGPQGMQRHPGPHGPLGPQGPPGPQGSSGPQGHMGPQGPPGPQGHIGPQGPPGPQGHLGPQGPPGTQGMQGPPGPRGMQGPPHPHGIQGGPGSQGIQGPV

SEQ ID NO: 618 - protein, 196 aa, Homo sapiens
GSLGSPGPPGPQGPPGLPGKTGPKGEKGELGRPGRKGRPGPPGVPGMPGPIGWPGPEGPRGEKGDLGMMGLPGSRGPMGSKGYPGSRGEKGSRGEKGDLGPKGEKGFPGFPGMLGQKGEMGPKGEPGIAGHRGPTGRPGKRGKQGQKGDSGVMGPPGKPGPSGQPGRPGPPGPPPAGQLIMGPKGERGFPGPPGRC

SEQ ID NO: 619 - protein, 59 aa, Homo sapiens
GPPGPNGPPGPPGPPGPQGPPGIPGIPGIPGTTVMGPPGPPGPPGPQGPPGLQGPSGAA

SEQ ID NO: 620 - protein, 84 aa, Homo sapiens
GPSGPPGPPGAGGLPGHNGLDGQPGPQGPKGEKGANGKRGKMGIPGAAGNPGERGEKGDHGELGLQGNEGPPGQKGEKGDKGDV

SEQ ID NO: 621 - DNA, 399 bp, Escherichia coli
gcggtgaaaattagcggcgtgctgaaagatggcgcgggcaaaccggtggtgaactgcgcgattgaactgcgcgcgcgccgcaccagcccgaccgtggtggcgcatgtggtggcgacctgcgtgaccgataacaacggcgcgtatgtgattgaagcggaaccgggctattatgaagtggcgctgcattgcaacggctggcagccgacccgcgtgggcgatattgatgtggcgccgaccgatgcgccgggcaccctgaacgcgtttctgaacgcgccgaaagatggcgatctgcgcccggaagtgatgaaacgctttgaagaaatggtggcgcaggcgcagcagagcgcgggcgcggcggcgggcaacgcgcagcagaccgcgcaggatgtggcgccggcg

SEQ ID NO: 622 - DNA, 399 bp, Escherichia coli
gcggtgaaaattagcggcgtgctgaaagatggcgcgggcaaaccggtggtgaactgcgcgattgaactgcgcgcgcgccgcaccagcccgaccgtggtggcgcatgtggtggcgacctgcgtgaccgataacaacggcgcgtatgtgattgaagcggaaccgggctattatgaagtggcgctgcattgcaacggctggcagccgacccgcgtgggcgatattgatgtggcgccgaccgatgcgccgggcaccctgaacgcgtttctgaacgcgccgaaagatggcgatctgcgcccggaagtgatgaaacgctttgaagaaatggtggcgcaggcgcagcagagcgcgggcgcggcggcgggcaacgcgcagcagaccgcgcaggatgtggcggcggcg

SEQ ID NO: 623 - DNA, 399 bp, Escherichia coli
gcggtgaaaattagcggcgtgctgaaagatggcgcgggcaaaccggtggtgaactgcgcgattgaactgcgcgcgcgccgcaccagcccgaccgtggtggcgcatgtggtggcgacctgcgtgaccgataacaacggcgcgtatgtgattgaagcggaaccgggctattatgaagtggcgctgcattgcaacggctggcagccgacccgcgtgggcgatattgatgtggcgccgaccgatgcgccgggcaccctgaacgcgtttctgaacgcgccgaaagatggcgatctgcgcccggaagtgatgaaacgctttgaagaaatggtggcgcaggcgcagcagagcgcgggcagcgcggcgggcaacgcgcagcagaccgcgcaggatgtggcggcggcg

SEQ ID NO: 624 - DNA, 399 bp, Escherichia coli
gcggtgaaaattagcggcgtgctgaaagatggcgcgggcaaaccggtggtgaactgcgcgattgaactgcgcgcgcgccgcaccagcccgaccgtggtggcgcatgtggtggcgacctgcgtgaccgataacaacggcgcgtatgtgattgaagcggaaccgggctattatgaagtggcgctgcattgcaacggctggcagccgacccgcgtgggcgatattgatgtggcgccgaccgatgcgccgggcaccctgaacgcgtttctgaacgcgccgaaagatggcgatctgcgcccggaagtgatgaaacgctttgaagaaatggtggtgcaggcgcagcagagcgcgggcgcggcggcgggcaacgcgcagcagaccgcgcaggatgtggcggcggcg

SEQ ID NO: 625 - DNA, 399 bp, Escherichia coli
agcgtgctgatttatggcgcgctgaccgatggcgcgggcattccgatgagcggctgccatattattctgaaaagccgcgtgaacaccagcgaagtggtgatgcgcaccgaagcggatgtggtgaccggcaacaacggcgaatatagctttgaagcgcgcaccggcaaatatcgcgtgtatctgaaacagggctggcgcgatgaatattgcgtgggcgatattgcggtgtatgatgatgcgaaaccgggcaccctgaacgattttctgaccgcgccggatgaaggcgatctgaaaccggatgtggtgaaacgctttgaacgcatggtggcgcaggcgcagcagagcgcggaaagcgcggcggaaagcgaacagcaggcgggccagcatgtggcggatgcg

SEQ ID NO: 626 - DNA, 399 bp, Escherichia coli
agcgtggtgattagcggcgcgctgattgatggcgcgggcattccgatgagcggctgccatattattctgaaaagccgcgtgaacaccagcgaagtggtgatgcgcaccgtggcggatgtggtgaccggcaactgcggcgaatattgctttaaagcgcagaccggcaaatattgcgtgtatctgaaacaggattggcgcgatgaatattgcgtgggcgatattgcggtgtatgatgatagccgcccgggcaccctgaacgattttctgaccgcgctggatgaaggcgatctgaaaccggatgtggtgaaacgctttgaagaaatggtggcgcaggcgcagcagagcgcggaagcggcggcggaaagcgaacgccaggcgggccagcatgcggcggatgcg

SEQ ID NO: 627 - DNA, 399 bp, Escherichia coli
agcgtggtgattagcggcgcgctgaccgatggcgcgggcattccgatgagcggctatcatattattctgaaaagccgcgtgaacacccgcgaagtggtgatgcataccgtggcggatgtgatgaccggcaacgatggcgaatattgctttcatgcgcgcaccggcaaatatggcgtgtatctgaaacaggattggcataacgaatataacgtgggcgatattgcggtgtatgaagatagcaaaccgggcaccctgaacgattttctgattgcgccggatgaaggcgatctgaaaccggatgtggtgaaacgctttgaagaaatggtggcgcaggcgcagcagagcgcgggcgcggcggcgggcaacgcgcagcagaccgcgcaggatgtggcggcggcg

SEQ ID NO: 628 - DNA, 399 bp, Escherichia coli
agcgtggtgattagcggcgcgctgaccgatggcgcgggcattagcatgagcggctatcatattattctgaaaagccgcgtgaacaccccggaagtggtgatgcataccgtggcggatgtgatgaccggcaacgatggcgaatattgctttcatgcgcgcaccggcaaatatggcgtgtatctgaaacaggattggcataacgaatataacgtgggcgatattgcggtgtatgaagatagcaaaccgggcaccctgaacgattttctgattgcgccggatgaaggcgatctgaaaccggatgtggtgaaacgctttgaagaaatggtggcgcaggcgcagcagagcgcgggcgcggcggcgggcaacgcgcagcagaccgcgcaggatgtggcggcggcg

SEQ ID NO: 629 - DNA, 399 bp, Escherichia coli
agcgtggtgattagcggcgcgctgaccgatggcgcgggcattccgatgagcggctatcatattattctgaaaagccgcgtgaacaccccggaagtggtgatgcataccgtggcggatgtgatgaccggcaacgatggcgaatattgctttcatgcgcgcaccggcaaatatggcgtgtatctgaaacaggattggcgcaacgaatataacgtgggcgatattgcggtgtatgaagatagcaaaccgggcaccctgaacgattttctgattgcgccggatgaaggcgatctgaaaccggatgtggtgaaacgctttgaagaaatggtggcgcaggcgcagcagagcgcgggcgcggcggcgggcaacgcgcagcagaccgcgcaggatgtggcggcggcg

SEQ ID NO: 630 - DNA, 399 bp, Escherichia coli
agcgtggtgattagcggcgcgctgaccgatggcgcgggcattccgatgagcggctatcatattattctgaaaagccgcgtgaacaccccggaagtggtgatgaacaccgtggcggatgtgatgaccggcaacgatggcgaatattgctttcatgcgcgcaccggcaaatatggcgtgtatctgaaacaggattggcgcaacgaatataacgtgggcgatattgcggtgtatgaagatagcaaaccgggcaccctgaacgattttctgattgcgccggatgaaggcgatctgaaaccggatgtggtgaaacgctttgaagaaatggtggcgcaggcgcagcagagcgcgggcgcggcggcgggcaacgcgcagcagaccgcgcaggatgtggcggcggcg

SEQ ID NO: 631 - DNA, 399 bp, Escherichia coli
agcgtggtgattagcggcgcgctgaccgatggcgcgggcattccgatgagcggctatcatattattctgaaaagccgcgtgaacaccccggaagtggtgatgaacaccgtggcggatgtgatggcgggcaacgatggcgaatattgctttcatgcgcgcaccggcaaatatggcgtgtatctgaaacaggattggcgcaacgaatataacgtgggcgatattgcggtgtatgaagatagcaaaccgggcaccctgaacgattttctgattgcgccggatgaaggcgatctgaaaccggatgtggtgaaacgctttgaagaaatggtggcgcaggcgcagcagagcgcgggcgcggcggcgggcaacgcgcagcagaccgcgcaggatgtggcggcggcg

SEQ ID NO: 632 - DNA, 399 bp, Escherichia coli
agcgtggtgattagcggcgcgctgaccgatggcgcgggcattccgatgagcggctatcatattattctgaaaagccgcgtgaacccgccggaagtggtgatgaacaccgtggcggatgtgatgaccggcaacgatggcgaatattgctttcatgcgcgcaccggcaaatatggcgtgtatctgaaacaggattggcgcaacgaatataacgtgggcgatattgcggtgtatgaagatagcaaaccgggcaccctgaacgattttctgattgcgccggatgaaggcgatctgaaaccggatgtggtgaaacgctttgaagaaatggtggcgcaggcgcagcagagcgcgggcgcggcggcgggcaacgcgcagcagaccgcgcaggatgtggcggcggcg

SEQ ID NO: 633 - DNA, 399 bp, Escherichia coli
agcgtggtgattagcggcgcgctgaccgatggcgcgggcattccgatgagcggctatcatattattctgaaaagccgcgtgaccccgccggaagtggtgatgcataccgtggcggatgtgatgaccggcaacgatggcgaatattgctttcatgcgcgcaccggcaaatatggcgtgtatctgaaacaggattggcgcaacgaatataacgtgggcgatattgcggtgtatgaagatagcaaaccgggcaccctgaacgattttctgattgcgccggatgaaggcgatctgaaaccggatgtggtgaaacgctttgaagaaatggtggcgcaggcgcagcagagcgcgggcgcggcggcgggcaacgcgcgccagaccgcgcaggatgtggcggcggcg

SEQ ID NO: 634 - DNA, 399 bp, Escherichia coli
agcgtgaaaattagcggcgcgctgattgatggcgcgggcattccgatgagcggctgccagattattctgaaagcgcgcgtgaacaccgcggaagtggtgatgcgcaccattgcgaccattaccaccggccgcaacggcgaatatagctttgaagcgcaggtgggccgctattgcgtgtatctgcgccatggctggagcaacgaatattgcgtgggcgatattaccgtgtatgatgatagcaaaccgggcaccctgaacgattttctgattgcgctggatgaaggcgatctgaaaccggatgtggtgaaacgctttgaagaactggtggcgcaggcgcagcagagcgcggatatggcggcggaaagcgcgcagcaggtgagccagagcgtgcaggatgtg

SEQ ID NO: 635 - DNA, 402 bp, Escherichia coli
accgtgcgcattagcggcgtgctgaaagatggcaccggcaaaccggtgccgggctgcaccattgaactgaaagcgcgccgcaccaccgaaaccgtgattgtgaccaccgtggcgcagggccagccggaagaaaccggcagctatagctttgatgtggaaccgggctggtatcgcgtgaccctgaacaccgaaggctatgcgccgagctatgtgggcgatattctggtgaaagcggatagcgaaccgggcaccctgaacaaatttctgatggaacaggatgaagcgcagtattatccgaaagcgctggcggaactggaagcggtggcggcggaaattctgaaacgcgcggaagcgagcgcggcgagcgcggaagaagcgaaaaaacgcgcggaaaacgcgcgc

SEQ ID NO: 636 - DNA, 402 bp, Escherichia coli
accgtgcgcattagcggcgtgctgaaagatggcaccggcaaaccggtgccgggctgcaccattgaactgaaagcgcgccgcaccaccgaaaccgtgattgtgaccaccgtggcgcagggccagccgggcgaaaccggcagctatagctttgatgtggaaccgggctggtatcgcgtgaccctgaacaccgaaggctatgcgccgagctatgtgggcgatattctggtgaaagcggatagcgaaccgggcaccctgaacaaatttctgatggaacaggatgaagcgcagtattatccgaaagcgctggcggaactggaagcggtggcggcggaaattctgaaacgcgcggaagcgagcgcggcgagcgcggaagaagcgaaaaaacgcgcggaaaacgcgcgc

SEQ ID NO: 637 - DNA, 399 bp, Escherichia coli
gcggtgaaaattagcggcgtgctgaaagatggcaccggcaaaccggtgcagaactgcaccattcagctgaaagcgcgccgcaacagcaccaccgtggtggtgaacaccgtggcgagcgaaaacccggatgaagcgggccgctatagcatggatgtggaatatggccagtatagcgtgagcctgctggtggaaggctttccgccgagccatgcgggcattattaccgtgtatgaagatagcaaaccgggcaccctgaacgattttctgggcgcgatgaccgaagatgatgtgcgcccggaagcgctgcgcccgtttgaactgatggtggaagaagtggcgcgccatgcggaagaagcgaaaaaaaacgcgggcgaagcggaaaccagcgcgcgcaacgcg

SEQ ID NO: 638 - DNA, 399 bp, Escherichia coli
gcggtgaaaattagcggcgtgctgaaagatggcaccggcaaaccggtgcagaactgcaccattcagctgaaagcgcgccgcaacagcaccaccgtggtggtgaacaccgtggcgagcgaaaacccggatgaagcgggccgctatagcatggatgtggaatatggccagtatagcgtgagcctgctggtggaaggctttccgccgagccatgcgggcattattaccgtgtatgaagatagcaaaccgggcaccctgaacgattttctgggcgcgatgaccgaagatgatgtgcgcccggaagcgctgcgccgctttgaactgatggtggaagaagtggcgcgccatgcggaagaagcgaaaaaaaacgcgggcgaagcggaaaccagcgcgcgcaacgcg

SEQ ID NO: 639 - DNA, 399 bp, Escherichia coli
accgtgaaaattagcggcgtgctgaaagatggcaccggcaaaccggtgcagaactgcaccattcagctgaaagcgaaacgcaacagcaccaccgtggtggtgaacaccctggcgagcgaaaacccggatgaagcgggccgctatagcatggatgtggaatatggccagtatagcgtgattctgctggtggaaggctttccgccgagccatgcgggcaccattaccgtgtatgaagatagccagccgggcaccctgaacgattttctgggcgcgatgaccgaagatgatgcgcgcccggaagcgctgcgccgctttgaactgatggtggaagaagtggtgcgcaacgcggaagaagcgaaaaaaaacgcgggcgaagcggaaaccagcgcgcgcaacgcg

SEQ ID NO: 640 - DNA, 399 bp, Escherichia coli
gcggtgaaaattagcggcgtgctgaaagatggcaccggcaaaccggtgcagaactgcaccattcagctgaaagcgaaacgcaacagcaccaccgtggtggtgaacaccctggcgagcgaaaacccggatgaagcgggccgctatagcatggatgtggaatatggccagtatagcgtgattctgctggtggaaggctttccgccgagccatgcgggcaccattaccgtgtatgaagatagccagccgggcaccctgaacgattttctgggcgcgatgaccgaagatgatgcgcgcccggaagcgctgcgccgctttgaactgatggtggaagaagtggcgcgccatgcggaagaagcgaaaaaaaacgcgggcgaagcggaaaccagcgcgcgcaacgcg

SEQ ID NO: 641 - DNA, 399 bp, Escherichia coli
gcggtgaaaattagcggcgtgctgaaagatggcaccggcaaaccggtgcagaactgcaccattcagctgaaagcgaaacgcaacagcaccaccgtggtggtgaacaccctggcgagcgaaaacccggatgaagcgggccgctatagcatggatgtggaatatggccagtatagcgtgattctgctggtggaaggctttccgccgagccatgcgggcaccattaccgtgtatgaagatagccagccgggcaccctgaacgattttctgggcgcgatgaccgaagatgatgcgcgcccggaagcgctgcgccgctttgaacagatggtggaagaagcggcgcgccatgcggaagaagcgaaaaaaaacgcgggcgaagcggaaaccagcgcgcgcaacgcg

SEQ ID NO: 642 - DNA, 399 bp, Escherichia coli
gcggtgaaaattagcggcgtgctgaaagatggcaccggcaaaccggtgcagaactgcaccattcagctgaaagcgaaacgcaacagcaccaccgtggtggtgaacaccctggcgagcgaaaacccggatgaagcgggccgctatagcatggatgtggaatatggccagtatagcgtgattctgctggtggaaggctttccgccgagccatgcgggcaccattaccgtgtatgaagatagccagccgggcaccctgaacgattttctgggcgcgatgagcgaagatgatgtgcgcccggaagcgctgcgccgctttgaactgatggtggaagaagcggcgcgccatgcggaagaagcgaaaaaaaacgcgggcgaagcggaaaccagcgcgcgcaacgcg

SEQ ID NO: 643 - DNA, 399 bp, Escherichia coli
gcggtgaaaattagcggcgtgctgaaagatggcaccggcaaaccggtgcagaactgcaccattcagctgaaagcgaaacgcaacagcagcaccgtggtggtgaacaccctggcgagcgaaaacccggatgaagcgggccgctatagcatggatgtggaatatggccagtatagcgtgattctgctggtggaaggctttccgccgagccatgcgggcaccattaccgtgtatgaagatagccagccgggcaccctgaacgattttctgggcgcgatgagcgaagatgatgtgcgcccggaagcgctgcgccgctttgaactgatggtggaagaagcggcgcgccatgcggaagaagcgaaaaaaaacgcgggcgaagcggaaaccagcgcgcgcaacgcg

SEQ ID NO: 644 - DNA, 402 bp, Escherichia coli
gcggcggtgcagattagcggcgtgctgaaagatggcgcgggcaaaccgattcagaactgcaccattcagctgaaagcgcgccgcaacagcaccaccgtggtggtgaacaccgtggcgagcgaaaacccggatgaagcgggccgctatagcatggatgtggaatatggccagtatagcgtgaccctgctggtggaaggctttccgccgagccatgcgggcaccattagcgtgtatgaagatagccagccgggcaccctgaacgattttctgggcgcgatgaccgaagatgatgcgcgcccggaagcgctgcgccgctttgaacagatggtggaagaagcggcgcgccatgcggaagaagcgaaaaaaaacgcgggcgaagcggaaaccagcgcgcgcaacgcg

SEQ ID NO: 645 - DNA, 402 bp, Escherichia coli
gcggcggtgcagattagcggcgtgctgaaagatggcgcgggcaaaccgattcagaactgcaccattcagctgaaagcgcgccgcaacagcaccaccgtggtggtgaacaccgtggcgagcgaaaacccggatgaagcgggccgctatagcatggatgtggaatatggccagtatagcgtgaccctgctggtggaaggctttccgccgagccatgcgggcaccattaccgtgtatgaagatagccagccgggcaccctgaacgattttctgggcgcgatgagcgaagatgatgtgcgcccggaagcgctgcgccgctttgaactgatggtggaagaagcggcgcgccatgcggaagaagcgaaaaaaaacgcgggcgaagcggaaaccagcgcgcgcaacgcg

SEQ ID NO: 646 - DNA, 399 bp, Escherichia coli
gcggtgaaaattagcggcgtgctgaaagatggcaccggcaaaccgattcagaactgcaccattcagctgaaagcgcgccgcaacagcaccaccgtggtggtgaacaccgtggcgagcgaaaacccggatgaagcgggccgctatagcatggatgtggaatatggccagtatagcgtgaccctgctggtggaaggctttccgccgagccatgcgggcaccattaccgtgtatgaagatagccagccgggcaccctgaacgattttctgggcgcgatgagcgaagatgatgtgcgcccggaagcgatgcgccgctttgaactgatggtggaagaagcggcgcgccatgcggaagaagcgaaaaaaaacgcgggcgaagcggaaaccagcgcgcgcaacgcg

SEQ ID NO: 647 - DNA, 399 bp, Escherichia coli
gcggtgaaaattagcggcgtgctgaaagatggcaccggcaaaccggtgcagaactgcaccattcagctgaaagcgaaacgcaacagcaccaccgtggtggtgaacaccgtggcgagcgaaaacccggatgaagcgggccgctatagcatggatgtggaatatggccagtatagcgtgaccctgctggtggaaggctttccgccgagccatgcgggcaccattaccgtgtatgaagatagccagccgggcaccctgaacgattttctgggcgcgatgagcgaagatgatgtgcgcccggaagcgctgcgccgctttgaacagatggtggaagaagcggcgcgccatgcgggcgaagcgaaaaaaaacgcgggcgaagcggaaaccagcgcgcgcaacgcg

SEQ ID NO: 648 - DNA, 399 bp, Escherichia coli
gcggtgaaaattagcggcgtgctgaaagatggcaccggcaaaccggtggaaaactgcaccattcagctgaaagcgcgccgcaacagcgcgaccgtggtggtgaacaccgtggcgagcgaaaacccggatgaagcgggccgctatagcatggatgtggaatatggccagtatagcgtgattctgctggtggaaggctttccgccgagccatgcgggcaccattaccgtgtatgaagatagccagccgggcaccctgaacgattttctgggcgcgatgagcgaagatgatgtgcgcccggaagcgctgcgccgctttgaactgatggtggaagaagcggcgcgccatgcggaagaagcgaaaaaaaacgcgggcgaagcggaaaccagcgcgcgcaacgcg

SEQ ID NO: 649 - DNA, 399 bp, Escherichia coli
gcggtgaaaattagcggcgtgctgaaagatggcaccggcaaaccggtggaaaactgcaccattcagctgaaagcgcgccgcaacagcgcgaccgtggtggtgaacaccgtggcgagcgaaaacccggatgaagcgggccgctatagcatggatgtggaatatggccagtatagcgtgattctgctggtggaaggctttccgagcagccatgcgggcaccattaccgtgtatgaagatagccagccgggcaccctgaacgattttctgggcgcgatgagcgaagatgatgtgcgcccggaagcgctgcgccgctttgaactgatggtggaagaagcggcgcgccatgcggaagaagcgaaaaaaaacgcgggcgaagcggaaaccagcgcgcgcaacgcg

SEQ ID NO: 650 - DNA, 399 bp, Escherichia coli
gcggtgaaaattagcggcgtgctgaaagatggcaccggcaaaccggtggaaaactgcaccattcagctgaaagcgcgccgcaacagcgcgaccgtggtggtgaacaccgtggcgagcgaaaacccggatgaagcgggccgctatagcatggatgtggaatatggccagtatagcgtgattctgctggtggaaggctttccgccgagccatgcgggcaccattaccgtgtatgaagatagccagccgggcaccctgaacgattttctgggcgcgatgagcgaagatgatgtgcgcccggaagcgctgcgccgctttgaactgatggtggaagaagtggcgcgccatgcggaagaagcgaaaaaaaacgcgggcgaagcggaaaccagcgcgcgcaacgcg

SEQ ID NO: 651 - DNA, 399 bp, Escherichia coli
gcggtgaaaattagcggcgtgctgaaagatggcaccggcaaaccggtggaaaactgcaccattcagctgaaagcgcgccgcaccagcagcaccgtggtggtgaacaccgtggcgagcgaaaacccggatgaagcgggccgctatagcatggatgtggaatatggccagtatagcgtgattctgctggtggaaggctttccgccgagccatgcgggcaccattaccgtgtatgaagatagccagccgggcaccctgaacgattttctgggcgcgatgagcgaagatgatgtgcgcccggaagcgctgcgccgctttgaactgatggtggaagaagtggcgcgccatgcggaagaagcgaaaaaaaacgcgggcgaagcggaaaccagcgcgcgcaacgcg

SEQ ID NO: 652 - DNA, 399 bp, Escherichia coli
gcggtgaaaattagcggcgtgctgaaagatggcaccggcaaaccggtggaaaactgcaccattcagctgaaagcgcgccgcaccagcagcaccgtggtggtgaacaccgtggcgagcgaaaacccggatgaagcgggccgctatagcatggatgtggaatatggccagtatcgcgtgattctgctggtggaaggctttccgccgagccatgcgggcaccattaccgtgtatgaagatagccagccgggcaccctgaacgattttctgggcgcgatgagcgaagatgatgtgcgcccggaagcgctgcgccgctttgaactgatggtggaagaagtggcgcgccatgcggaagaagcgaaaaaaaacgcgggcgaagcggaaaccagcgcgcgcaacgcg

SEQ ID NO: 653 - DNA, 399 bp, Escherichia coli
gcggtgaaaattagcggcgtgctgaaagatggcaccggcaaaccggtggaaaactgcaccattcagctgaaagcgcgccgcagcagcagcaccgtggtggtgaacaccgtggcgagcgaaaacccggatgaagcgggccgctatagcatggatgtggaatatggccagtatagcgtgattctgctggtggaaggctttccgccgagccatgcgggcaccattaccgtgtatgaagatagccagccgggcaccctgaacgattttctgggcgcgatgagcgaagatgatgtgcgcccggaagcgctgcgccgctttgaactgatggtggaagaagtggcgcgccatgcggaagaagcgaaaaaaaacgcgggcgaagcggaaaccagcgcgcgcaacgcg

SEQ ID NO: 654 - DNA, 399 bp, Escherichia coli
gcggtgaaaattagcggcgtgctgaaagatggcaccggcaaaccggtggaaaactgcaccattcagctgaaagcgcgccgcaccagcagcaccgtggtggtgaacaccgtggcgagcgaaaacccggatgaagcgggccgctatagcatggatgtggaatatggccagtatagcgtgattctgctggtggaaggctttccgccgagccatgcgggcaccattaccgtgtatgaagatagccagccgggcaccctgaacgattttctgggcgcgatgaccgaagatgatgcgcgcccggaagcgctgcgccgctttgaactgatggtggaagaagtggcgcgccatgcggaagaagcgaaaaaaaacgcgggcgaagcggaaaccagcgcgcgcaacgcg

SEQ ID NO: 655 - DNA, 399 bp, Escherichia coli
gcggtgaaaattagcggcgtgctgaaagatggcaccggcaaaccggtggaaaactgcaccattcagctgaaagcgcgccgcaccagcagcaccgtggtggtgaacaccgtggcgagcgaaaacccggatgaagcgggccgctatagcatggatgtggaatatggccagtatagcgtgattctgctggtggaaggctttccgccgagccatgcgggcaccattaccgtgtatgaagatagccgcccgggcaccctgaacgattttctgggcgcgatgaccgaaggcgatgtgcgcccggaagcgctgcgccgctttgaactgatggtggaagaagtggcgcgccatgcggaagaagcgaaaaaaaacgcgggcgaagcggaaaccagcgcgcgcaacgcg

SEQ ID NO: 656 - DNA, 399 bp, Escherichia coli
gcggtgaaaattagcggcgtgctgaaagatggcaccggcaaaccggtggaaaactgcaccattcagctgaaagcgcgccgcaccagcagcaccgtggtggtgaacaccgtggcgagcgaaaacccggatgaagcgggccgctatagcatggatgtggaatatggccagtatagcgtgattctgctggtggaaggctttccgccgagccatgcgggcaccattaccgtgtatgaagatagccagccgggcaccctgaacgattttctgggcgcgatgagcgaagatgatgtgcgcccggaagcgctgcgccgctttgaactgatggtggaagaagcggcgcgccatgcggaagaagcgaaaaaaaacgcgggcgaagcggaaaccagcgcgcgcaacgcg

SEQ ID NO: 657 - DNA, 399 bp, Escherichia coli
gcggtgaaaattagcggcgtgctgaaagatggcaccggcaaaccggtggaaaactgcaccattcagctgaaagcgcgccgcaccagcagcaccgtggtggtgaacaccgtggcgagcgaaaacccggatgaagcgggccgctataccatggatgtggaatatggccagtatagcgtgattctgctggtggaaggctttccgccgagccatgcgggcaccattaccgtgtatgaagatagccagccgggcaccctgaacgattttctgggcgcgatgagcgaagatgatgtgcgcccggaagcgctgcgccgctttgaactgatggtggaagaagcggcgcgccatgcggaagaagcgaaaaaaaacgcgggcgaagcggaaaccagcgcgcgcaacgcg

SEQ ID NO: 658 - DNA, 399 bp, Escherichia coli
gcggtgaaaattagcggcgtgctgaaagatggcaccggcaaaccggtggaaaactgcaccattcagctgaaagcgcgccgcaccagcagcaccgtggtggtgaacaccgtggcgagcgaaaacccggatgaagcgggccgctatagcatggatgtggaatatggccagtatagcgtgattctgctggtggaaggctttccgccgagccatgcgggcaccattaccgtgtatgaagatagccagccgggcaccctgaacgattttctgggcgcgatgagcgaagatgatgtgcgcccggaagcgctgcgccgctttgaactgatgctggaagaagcggcgcgccatgcggaagaagcgaaaaaaaacgcgggcgaagcggaaaccagcgcgcgcaacgcg

SEQ ID NO: 659 - DNA, 414 bp, Escherichia coli
gcggtgaaaattagcggcgtgctgaaagatggcaccggcaaaccggtggaaaactgcaccattcagctgaaagcgcgccgcaccagcagcaccgtggtggtgaacaccgtggtggtgaacaccgtggcgagcgaaaacccggatgaagcgggccgctatagcatggatgtggaatatggccagtatagcgtgattctgctggtggaaggctttccgccgagccatgcgggcattattaccgtgtatgaagatagccagccgggcaccctgaacgattttctgggcgcgatgagcgaagatgatgtgcgcccggaagcgctgcgccgctttgaactgatggtggaagaagcggcgcgccatgcggaagaagcgaaaaaaaacgcgggcgaagcggaaaccagcgcgcgcaacgcg

SEQ ID NO: 660 - DNA, 399 bp, Escherichia coli
gcggtgaaaattagcggcgtgctgaaagatggcaccggcaaaccggtggaaaactgcaccattcagctgaaagcgcgccgcaccagcagcaccgtggtggtgaacaccgtggcgagcgaaaacccggatgaagcgggccgctatagcatggatgtggaatatggccagtatagcgtgattctgctggtggaaggctttccgccgagccatgcgggcaccattaccgtgtatgaagatagccgcccgggcaccctgaacgattttctgggcgcgatgagcgaagatgatgtgcgcccggaagcgctgcgccgctttgaactgatggtggaagaagcggcgcgccatgcgggcgaagcgaaaaaaaacgcgggcgaagcggaaaccagcgcgcgcaacgcg

SEQ ID NO: 661 - DNA, 399 bp, Escherichia coli
accgtgaaaattagcggcgtgctgaaagatggcaccggcaaaccggtgcagaactgcaccattgtgctgaaagcgcgccgcaccagcagcaccgtggtggtgaacaccgtggcgagcgaaaacccggatgaagcgggccgctatagcatggatgtggaatatggccagtatagcgtgattctgctggtggaaggctttccgccgagccatgcgggcaccattaccgtgtatgaagatagccagccgggcaccctgaacgattttctgggcgcgatgagcgaagatgatgtgcgcccggaagcgctgcgccgctttgaactgatggtggaagaagcggcgcgccatgcggaagaagcgaaaaaaaacgcgggcgaagcggaaaccagcgcgcgcaacgcg

SEQ ID NO: 662 - DNA, 399 bp, Escherichia coli
accgtgaaaattagcggcgtgctgaaagatggcaccggcaaaccggtgcagaactgcaccattgtgctgaaagcgcgccgcaccagcagcaccgtggtggtgaacaccgtggcgagcgaaaacccggatgaagcgggccgctatagcatggatgtggaacatggccagtatagcgtgaccctgctggtggaaggctttccgccgagccatgcgggcaccattaccgtgtatgaaggcagccgcccgggcaccctgaacgattttctgggcgcgatgaccgaagatgatgtgcgcccggaagcgctgcgccgctttgaactgatggtggaagaagcggcgcgccatgcggaagaagcgaaaaaaaacgcgggcgaagcggaaaccagcgcgcgcaacgcg

SEQ ID NO: 663 - DNA, 399 bp, Escherichia coli
accgtgaaaattagcggcgtgctgaaagatggcaccggcaaaccggtgcagaactgcaccattgtgctgaaagcgcgccgcaccagcagcaccgtggtggtgaacaccgtggcgagcgaaaacccggatgaagcgggccgctatagcatggatgtggaacatggccagtatagcgtgaccctgctggtggaaggctttccgccgagccatgcgggcaccattaccgtgtatgaagatagccgcccgggcaccctgaacgattttctgggcgcgatgaccgaagatgatgcgcgcccggaagcgctgcgccgctttgaactgatggtggaagaagtggtgcgcaacgcggaagaagcgaaaaaaaacgcgggcgaagcggaaaccagcgcgcgcaacgcg

SEQ ID NO: 664 - DNA, 399 bp, Escherichia coli
accgtgaaaattagcggcgtgctgaaagatggcaccggcaaaccggtgcagaactgcaccattgtgctgaaagcgcgccgcaccagcagcaccgtggtggtgaacaccgtggcgagcgaaaacccggatgaagcgggccgctatagcatggatgtggaatatggccagtatagcgtgaccctgctggtggaagattttccgccgagccatgcgggcaccattaccgtgtatgaaggcagccgcccgggcaccctgaacgattttctgggcgcgatgaccgaagatgatgtgcgcccggaagcgctgcgccgctttgaactgatggtgaacgaagtggcgcgccatgcgggcgcgagcagccagagcgcggcggcggcgaaaaaaagcgaaaccgcggcg

SEQ ID NO: 665 - DNA, 399 bp, Escherichia coli
accgtgaaaattagcggcgtgctgaaagatggcaccggcaaaccggtgcagaactgcaccattgtgctgaaagcgcgccgcaccagcagcaccgtggtggtgaacaccgtggcgagcgaaaacccggatgaagcgggccgctatagcatggatgtggaatatggccagtatagcgtgaccctgctggtggaagattttccgccgagccatgcgggcaccattaccgtgtatgaaggcagccgcccgggcaccctgaacgattttctgggcgcgatgaccgaagatgatgtgatgccggaagcgctgcgccgctttgaactgatggtgaacgaagtggcgcgccatgcgggcgcgagcagccagagcgcggcggcggcgaaaaaaagcgaaaccgcggcg

SEQ ID NO: 666 - DNA, 399 bp, Escherichia coli
accgtgaaaattagcggcgtgctgaaagatggcaccggcaaaccggtgcagaactgcaccattgtgctgaaagcgcgccgcaccagcagcaccgtggtggtgaacaccgtggcgagcgaaaacccggatgaagcgggccgctatagcatggatgtggaatatggccagtatagcgtgaccctgctggtggaaggctttccgccgagccatgcgggcaccattaccgtgtatgaaggcagccgcccgggcaccctgaacgattttctgggcgcgatgaccgaagatgatgtgcgcccggaagcgctgcgccgctttgaactgatggtgaacgaagtggcgcgccatgcgggcgcgagcagccagagcgcggcggcggcgaaaaaaagcgaaaccgcggcg

SEQ ID NO: 667 - DNA, 399 bp, Escherichia coli
gcggtgcagattagcggcgtgctgaaagatggcgcgggcaaaccgattcagaactgcaccattcagctgaaagcgaaacgcaacagcaccaccgtggtggtgaacaccgtggcgagcgaaaacccggatgaagcgggccgctatagcatggatgtggaatatggccagtatagcgtgattctgctggtggaaggctttccgccgagccatgcgggcgcgattaccgtgtatgaagatagcaaaccgggcaccctgaacgattttctgggcgcggcgaccgaagatgatgtgcgcccggaagcgctgtatcgctttgaaaaaatggtggaagaagtggcgcgcaacgcggaagcggcgagccagagcgcggcggcggcgaaaaaaagcgaaaccgcggcg

SEQ ID NO: 668 - DNA, 399 bp, Escherichia coli
gcggtgcagattagcggcgtgctgaaagatggcgcgggcaaaccgattcagaactgcaccattcagctgaaagcgaaacgcaacagcaccaccgtgctggtgaacaccgtggcgagcgaaaacccggatgaagcgggccgctatagcatggatgtggaacatggccagtatagcgtgattctgctggtggaaggctttccgccgagccatgcgggcaccattaccgtgtatgaaggcagccgcccgggcaccctgaacgattttctgggcgcgatgaccgaagaagatgtgatgccggaagcgctgcgccgctttgaagtgatggtggaagatgtggcgcgcaacgcggaagcggcgagccagagcgcggcggcggcgaaaaaaagcgaaaccgcggcg

SEQ ID NO: 669 - DNA, 402 bp, Escherichia coli
gcggcggtgaaaattagcggcgtgctgaaagatggcgcgggcaaaccgattcagaactgcaccattcagctgaaagcgaaacgcaacagcaccaccgtgctggtgaacaccgtggcgagcgaaaacccggatgaagcgggccgctatagcatggatgtggaatatggccagtatagcgtgattctgctggtggaaggctttccgccgagccatgcgggcaccattaccgtgtatgaaggcagccgcccgggcaccctgaacgattttctgggcgcgatgaccgaagaagatgtgatgccggaagcgctgcgccgctttgaagcgatggtggaagaagtggcgcgcaacgcggaagcggcgagccagagcgcggcggcggcgaaaaaaagcgaaaccgcggcg

SEQ ID NO: 670 - DNA, 402 bp, Escherichia coli
gcggcggtgaaaattagcggcgtgctgaaagatggcgcgggcaaaccgattcagaactgcaccattcagctgaaagcgaaacgcaacagcaccaccgtgctggtgaacaccgtggcgagcgaaaacccggatgaagcgggccgctatagcatggatgtggaatatggccagtatagcgtgattctgctggtggaaggctttccgccgagccatgcgggcaccattaccgtgtatgaaggcagccgcccgggcaccctgaacgattttctgggcgcgatgaccgaagatgatgtgatgccggaagcgctgcgccgctttgaagaaatggtggaagaagcggcgcgcaacgcggaagcggcgagccagagcgcggcggcggcgaaaaaaagcgaaaccgcggcg

SEQ ID NO: 671 - DNA, 402 bp, Escherichia coli
gcggcggtgaaaattagcggcgtgctgaaagatggcgcgggcaaaccgattcagaactgcaccattcagctgaaagcgaaacgcaacagcaccaccgtgctggtgaacaccgtggcgagcgaaaacccggatgaagtgggccgctatagcatggatgtggaatatggccagtatagcgtgattctgctggtggaaggctttccgccgagccatgcgggcaccattaccgtgtatgaaggcagccgcccgggcaccctgaacgattttctgggcgcgatgaccgaagatgatgtgatgccggaagcgctgcgccgctttgaagaaatggtggaagaagcggcgcgcaacgcggaagcggcgagccagagcgcggcggcggcgaaaaaaagcgaaaccgcggcg

SEQ ID NO: 672 - DNA, 402 bp, Escherichia coli
gcggcggtgaaaattagcggcgtgctgaaagatggcgcgggcaaaccgattcagaactgcaccattcagctgaaagcgaaacgcaacagcaccaccgtgctggtgaacaccgtggcgagcgaaaacccggatgaagcgggccgctatagcatggatgtggaatatggccagtatagcgtgaccctgctggtggaaggctttccgccgagccatgcgggcaccattaccgtgtatgaaggcagccgcccgggcaccctgaacgattttctgggcgcgatgaccgaagatgatgtgatgccggaagcgctgcgccgctttgaagcgatggtggaagaagcggcgcgcaacgcggaagcggcgagccagagcgcggcggcggcgaaaaaaagcgaaaccgcggcg

SEQ ID NO: 673 - DNA, 399 bp, Escherichia coli
gcggtgcagattagcggcgtgctgaaagatggcgcgggcaaaccgattcagaactgcaccattcagctgaaagcgaaacgcaacagcaccaccgtgctggtgaacaccgtggcgagcgaaaacccggatgaagcgggccgctatagcatggatgtggaatatggccagtatagcgtgattctgctggtggaaggctttccgccgagccatgcgggcaccattaccgtgtatgaaggcagccgcccgggcaccctgaacgattttctgggcgcgatgaccgaagatgatgtgatgccggaagcgctgcgccgctttgaagaaatggtggaagaagcggcgcgcaacgcggaagcggcgagccagagcgcggcggcggcgaaaaaaagcgaaaccgcggcg

SEQ ID NO: 674 - DNA, 399 bp, Escherichia coli
accgtgaaaattagcggcgtgctgaaagatggcaccggcaaaccggtgcagaactgcaccattgtgctgaaagcgcgccgcaccagcagcaccgtggtggtgaacaccgtggcgagcgaaaacccggatgaagcgggccgctatagcatggatgtggaacatggccagtatagcgtgaccctgctggtggaaggctttccgccgagccatgcgggcaccattaccgtgtatgaaggcagccgcccgggcaccctgaacgattttctgggcgcgatgaccgaagatgatgtgcgcccggaagcgctgcgccgctttgaacagatggtggaagaagtgagccgcaacgcgagcgcggtggcgcagaacaccgcggcggcgaaaaaaagcgcgagcgatgcg

SEQ ID NO: 675 - DNA, 399 bp, Escherichia coli
gcggtgaaaattagcggcgtgctgaaagatggcaccggcaaaccggtgcagaactgcaccattcagctgaaagcgaaacgcaacagcaccaccgtggtggtgaacaccgtggcgagcgaaaacccggatgaagcgggccgctatagcatgaacgtggaatatggccagtatagcgtgaccctgctggtggaaggctttccgccgagccatgcgggcaccattaccgtgtgcgaaggcagccgcccgggcaccctgaacgattttctgggcgcgatgaccgaagatgatgtgtgcccggaagcgctgcgccgctttgaactgatggtggaagaagtggcgcgcaacgcgagcgcggtggcgcagaacaccgcggcggcgaaaaaaagcgcgcgcgatgcg

SEQ ID NO: 676 - DNA, 399 bp, Escherichia coli
gcggtgaaaattagcggcgtgctgaaagatggcaccggcaaaccggtgcagaactgcaccattcagctgaaagcgaaacgcaacagcaccaccgtggtggtgaacaccctggcgagcgaaaacccggatgaagcgggccgctatagcatggatgtggaatatggccagtatagcgtgattctgctggtggaaggctttccgccgagccatgcgggcaccattaccgtgtatgaagatagccagccgggcaccctgaacgattttctgggcgcgatgaccgaagatgatgcgcgcccggaagcgctgcgccgctttgaacagatggtggaagaagtggcgcgcaacgcgagcgtggtggcgcagaacaccgcggcggcgaaaaaaagcgcgagcgatgcg

SEQ ID NO: 677 - DNA, 399 bp, Escherichia coli
gcggtgaaaattagcggcgtgctgaaagatggcaccggcaaaccggtgcagaactgcaccattcagctgaaagcgaaacgcaacagcaccaccgtggtggtgaacaccctggcgagcgaaaacccggatgaagcgggccgctatagcatggatgtggaatatggccagtatagcgtgattctgatggtggaaggctttccgccgagccatgcgggcaccattaccgtgtatgaagatagcaaaccgggcaccctgaacgattttctgggcgcgatgaccgaagatgatgcgcgcccggaagcgctgcgccgctttgaactgatggtggaagaagtggcgcgcaacgcgagcgtggtggcgcagaacaccgcggcggcgaaaaaaagcgcgagcgatgcg

SEQ ID NO: 678 - DNA, 399 bp, Escherichia coli
gcggtgaaaattagcggcgtgctgaaagatggcaccggcaaaccggtgcagaactgcaccattcagctgaaagcgaaacgcaacagcaccaccgtggtggtgaacaccctggcgagcgaaaacccggatgaagcgggccgctatagcatggatgtggaatatggccagtatagcgtgattctgctggtggaaggctttccgccgagccatgcgggcaccattaccgtgtatgaagatagccgcccgggcaccctgaacgattttctgggcgcgatgaccgaagatgatgcgcgcccggaagcgctgcgccgctttgaactgatggtggaagaagtggcgcgcaacgcgagcgcggtggcgcagaacaccgcggcggcgaaaaaaagcgcgagcgatgcg

SEQ ID NO: 679 - DNA, 399 bp, Escherichia coli
gcggtgaaaattagcggcgtgctgaaagatggcaccggcaaaccggtgcagaactgcaccattcagctgaaagcgaaacgcaacagcaccaccgtggtggtgaacaccctggcgagcgaaaacccggatgaagcgggccgctatagcatggatgtggaatatggccagtatagcgtgattctgctggtggaaggctttccgccgagccatgcgggcaccattaccgtgtatgaagatagccgcccgggcaccctgaacgattttctgggcgcgatgaccgaagatgatgcgcgcccggaagcgctgcgccgctttgaactgatggtggaagaagtgacccgcaacgcgagcgcggtggcgcagaacaccgcggcggcgaaaaaaagcgcgagcgatgcg

SEQ ID NO: 680 - DNA, 399 bp, Escherichia coli
gcggtgaaaattagcggcgtgctgaaagatggcaccggcaaaccggtgcagaactgcaccattcagctgaaagcgaaacgcaacagcaccaccgtggtggtgaacaccctggcgagcgaaaacccggatgaagcgggccgctatagcatggatgtggaatatggccagtatagcgtgattctgctggtggaaggctttccgccgagccatgcgggcaccattaccgtgtatgaagatagccgcccgggcaccctgaacgattttctgggcgcgatgaccgaagatgatgcgcgcccggaagcgctgcgccgctttgaactgatggtggaagaagtggcgcgcaacgcgagcgcggtggcgcagaacaccgcggcggcgaaaaaaagcgcgggcgatgcg

SEQ ID NO: 681 - DNA, 399 bp, Escherichia coli
gcggtgaaaattagcggcgtgctgaaagatggcaccggcaaaccggtgcagaactgcaccattcagctgaaagcgaaacgcaacagcaccaccgtggtggtgaacaccctggcgagcgaaaacccggatgaagcgggccgctatagcatggatgtggaatatggccagtatagcgtgattctgctggtggaaggctttccgccgagccatgcgggcaccattaccgtgtatgaagatagccagccgggcaccctgaacgattttctgggcgcgatgaccgaagatgatgcgcgcccggaagcgctgcgccgctttgaactgatggtggaagaagtggcgcgcaacgcgagcgcggtggcgcagaacaccgcggcggcgaaaaaaagcgcgagcgatgcg

SEQ ID NO: 682 - DNA, 399 bp, Escherichia coli
gcggtgaaaattagcggcgtgctgaaagatggcgcgggcaaaccggtgcagaactgcaccattcagctgaaagcgaaacgcaacagcaccaccgtggtggtgaacaccgtggcgagcgaaaacccggatgaagcgggccgctatagcatggatgtggaacatggccagtatagcgtgattctgctggtggaaggctttccgccgagccatgcgggcaccattaccgtgtatgaagatagccagccgggcaccctgaacgattttctgggcgcgatgaccgaagatgatgcgcgcccggaagcgctgcgccgctttgaactgatggtggaagaagtggcgcgcaacgcgagcgcggtggcgcagaacaccgcggcggcgaaaaaaagcgcgagcgatgcg

SEQ ID NO: 683 - DNA, 399 bp, Escherichia coli
gcggtgaaaattagcggcgtgctgaaagatggcgcgggcaaaccgattcagaactgcaccattcagctgaaagcgaaacgcaacagcaccaccgtggtggtgaacaccgtggcgagcgaaaacccggatgaagcgggccgctatagcatggatgtggaatatggccagtatagcgtgattctgctggtggtgggctttccgccgagccatgcgggcaccattaccgtgcatgaagatagccgcccgggcaccctgaacgattttctgggcgcgatgaccgaagatgatgcgcgcccggaagcgctgcgccgctttgaactgatggtggaagaagtggcgcgcaacgcgagcgcggtggcgcagaacaccgcggcggcgaaaaaaagcgcgagcgatgcg

SEQ ID NO: 684 - DNA, 399 bp, Escherichia coli
gcggtgcgcattagcggcgtgctgaaagatggcgcgggcaaaccgattcagaactgcaccattcagctgaaagcgcgccgcaacagcaccaccgtggtggtgaacaccgtggcgagcgaaaacccggatgaagcgggccgctatagcatggatgtggaatatggccagtatagcgtgattctgctggtggaaggctttccgccgagccatgcgggcaccattaccgtgtatgaagatagccagccgggcaccctgaacgattttctgggcgcgatgaccgaagatgatgtgcgcccggaagcgctgcgccgctttgaactgatggtggaagaagtggcgcgcaacgcgagcgcggtggcgcagaacaccgcggcggcgaaaaaaagcgcgagcgatgcg

SEQ ID NO: 685 - DNA, 399 bp, Escherichia coli
gcggtgcgcattagcggcgtgctgaaagatggcgcgggcaaaccgattcagaactgcaccattcagctgaaagcgcgccgcaacagcaccaccgtggtggtgaacaccgtggcgagcgaaaacccggatgaagcgggccgctataccatggatgtggaatatggccagtatagcgtgagcctgctggtggaaggctttccgccgagccatgcgggcattattaccgtgtatgaagatagcaaaccgggcaccctgaacgattttctgggcgcgatgaccgaagatgatgtgcgcccggaagcgctgcgccgctttgaactgatggtggaagaagtggcgcgcaacgcgagcgcggtggcgcagaacaccgcggcggcgaaaaaaagcgcgggcgatgcg

SEQ ID NO: 686 - DNA, 399 bp, Escherichia coli
gcggtgaaaattagcggcgtgctgaaagatggcaccggcaaaccggtggaaaactgcaccattcagctgaaagcgcgccgcaacagcgcgaccgtggtggtgaacaccgtggcgagcgaaaacccggatgaagcgggccgctatagcatggatgtggaatatggccagtatagcgtgattctgctggtggaaggctttccgccgagccatgcgggcaccattaccgtgtatgaagatagccagccgggcaccctgaacgattttctgggcgcgatgaccgaagatgatgtgcgcccggaagcgctgcgccgctttgaactgatggtggaagaagtggcgcgcaacgcgagcgcggtggcgcagaacaccgcggcggcgaaaaaaagcgcgagcgatgcg

SEQ ID NO: 687 - DNA, 399 bp, Escherichia coli
gcggtgaaaattagcggcgtgctgaaagatggcaccggcaaaccggtgcagaactgcaccattcagctgaaagcgcgccgcaacagcaccaccgtggtggtgaacaccgtgggcagcgaaaacccggatgaagcgggccgctatagcatggatgtggaatatggccagtatagcgtgattctgcaggtggatggctttccgccgagccatgcgggcaccattaccgtgtatgaagatagccagccgggcaccctgaacgattttctgtgcgcgatgaccgaagatgatgcgcgcccggaagtgctgcgccgcctggaactgatggtggaagaagtggcgcgcaacgcgagcgtggtggcgcagagcaccgcggatgcgaaaaaaagcgcgggcgatgcg

SEQ ID NO: 688 - DNA, 387 bp, Escherichia coli
gcggtgaaaattagcggcgtgctgaaagatggcaccggcaaaccggtgcagaactgcaccattcagctgaaagcgcgccgcaacagcaccaccgtggtggtgaacaccgtgggcagcgaaaacccggatgaagcgggccgctatagcatggatgtggaatatggccagtatagcgtgattctgcaggtggatggctttccgccgagccatgcgggcaccattaccgtgtatgaagatagccagccgggcaccctgaacgattttctgtgcgcgatgaccgaagatgatgcgcgcccggaagtgctgcgccgcctggaactgatggtggaagaagtggcgcgcaacggcaaaagcaacgtgggctgcaaccagtatgtgattaccgat

SEQ ID NO: 689 - DNA, 399 bp, Escherichia coli
ccggtgctgattagcggcgtgctgaaagatgcgaccggcaccccggtgcagaactgcaccattcagctgaaagcgtgccgcaccagcaccaccgtggtggtgaacaccgtggcgagcgaaaacccggatgatgcgggccgctatagcatggatgtggaacagggccagtataccgtgaccctgctggtggaaggctatccgccgagccatgcgggcgtgattaccgtgtatgatgatagcaaaccgggcaccctgaacgattttctgggcgcgatgaccgaagatgatgtgcgcccggaagcgctgcgccgctttgaagcgatggtggaagaagtggcgcgccaggcgagcgaagcgagccgcaacgcgaccagcgcgggccaggcgagcgaacaggcg

SEQ ID NO: 690 - DNA, 399 bp, Escherichia coli
ccggtgctgattagcggcgtgctgaaagatgcgaccggcaccccggtgcagaactgcaccattcagctgaaagcgtgccgcaccagcaccaccgtggtggtgaacaccgtggcgagcgaaaacccggatgatgcgggccgctatagcatggatgtggaacagggccagtataccgtgaccctgctggtggaaggctatccgccgagccatgcgggcgtgattaccgtgtatgatgatagcaaaccgggcaccctgaacgattttctgggcgcgatgaccgaagatgatgtgcgcccggaagcgctgcgccgctttgaagcgatggtggaagaagtggcgcgccaggcgagcgaagcgagccgcaacgcgaccgcggcgggccaggcgagcgaacaggcg

SEQ ID NO: 691 - DNA, 399 bp, Escherichia coli
ccggtgctgattagcggcgtgctgaaagatggcaccggcaccccggtgcagaactgcaccattcagctgaaagcgtgccgcaccagcaccaccgtggtggtgaacaccgtggcgagcgaaaacccggatgatgcgggccgctatagcatggatgtggaacagggccagtataccgtgaccctgctggtggatggctatccgccgagccatgcgggcgtgattaccgtgtatgatgatagcaaactgggcaccctgaacgattttctgggcgcgatgaccgaagatgatgtgcgcccggaagcgctgcgccgctttgaagcgatggtggaagaagtggcgcgccaggcgagcgaagcgagccgcaacgcgaccgcggcgggccaggcgagcgaacaggcg

SEQ ID NO: 692 - DNA, 399 bp, Escherichia coli
ccggtgctgattagcggcgtgctgaaagatggcaccggcaccccggtgcagaactgcaccattcagctgaaagcgtgccgcaccagcaccaccgtggtggtgaacaccgtggcgagcgaaaacccggatgatgcgggccgctatagcatggatgtggaacagggccagtataccgtgaccctgctggtggatggctatccgccgagccatgcgggcgtgattaccgtgtatgatgatagcaaaccgggcaccctgaacgattttctgggcgcgatgaccgaagatgatgtgcgcccggaagcgctgcgccgctttgaagcgatggtggaagaagtggcgcgccaggcgagcgaagcgagccgcaacgcgaccgcggcgggccaggcgagcgaacaggcg

SEQ ID NO: 693 - DNA, 399 bp, Escherichia coli
ccggtgctgattagcggcgtgctgaaagatggcaccggcaccccggtgcagaactgcaccattcagctgaaagcgtgccgcaccagcaccaccgtggtggtgaacaccgtggcgagcgaaaacccggatgatgcgggccgctatagcatggatgtggaacagggccagtataccgtgaccctgctggtggatggctatccgccgagccatgcgggcgtgattaccgtgtatgatgatagcaaaccgggcaccctgaacgattttctgggcgcgatgaccgaagatgatgtgcgcccggaagcgctgcgcagctttgaagcgatggtggaagaagtggcgcgccaggcgagcgaagcgagccgcaacgcgaccgcggcgggccaggcgagcgaacaggcg

SEQ ID NO: 694 - DNA, 399 bp, Escherichia coli
ccggtgctgattagcggcgtgctgaaagatggcaccggcaccccggtgcagaactgcaccattcagctgaaagcgtgccgcaccagcaccaccgtggtggtgaacaccgtggcgagcgaaaacccggatgatgcgggccgctatagcatggatgtggaacagggccagtataccgtgaccctgctggtggaaggctatccgccgagccatgcgggcgtgattaccgtgtatgatgatagcaaaccgggcaccctgaacgattttctgggcgcgatgaccgaagatgatgtgcgcccggaagcgctgcgccgctttgaagcgatggtggaagaagtggcgcgccaggcgagcgaagcgagccgcaacgcgaccgcggcgggccaggcgagcgaacaggcg

SEQ ID NO: 695 - DNA, 399 bp, Escherichia coli
ccggtgctgattagcggcgtgctgaaagatggcaccggcaccccggtgcagaactgcaccattcagctgaaagcgtgccgcaccagcaccaccgtggtggtgaacaccatggcgagcgaaaacccggatgatgcgggccgctatagcatggatgtggaacagggccagtataccgtgaccctgctggtggaaggctatccgccgagccatgcgggcgtgattaccgtgtatgatgatagcaaaccgggcaccctgaacgattttctgggcgcgatgaccgaagatgatgtgcgcccggaagcgctgcgccgctttgaagcgatggtggaagaagtggcgcgccaggcgagcgaagcgagccgcaacgcgaccgtggcgggccaggcgagcgaacaggcg

SEQ ID NO: 696 - DNA, 399 bp, Escherichia coli
ccggtgctgattagcggcgtgctgaaagatggcgcgggcaccccggtgcagaactgcaccattcagctgaaagcgtgccgcaccagcaccaccgtggtggtgaacaccgtggcgagcgaaaacccggatgatgcgggccgctatagcatggatgtggaacagggccagtatgcggtgaccctgctggtggaaggctatccgccgagccatgcgggcgtgattaccgtgtatgatgatagcaaaccgggcaccctgaacgattttctgggcgcgatgaccgaagatgatgtgcgcccggaagcgctgcgccgctttgaagcgatggtggaagaagtggcgcgccaggcgagcgaagcgctgcgcaacgcgaccgcggcgggccaggcgagcgaacaggcg

SEQ ID NO: 697 - DNA, 399 bp, Escherichia coli
ccggtgctgattagcggcgtgctgaaagatggcaccggcatgccggtgcagaactgcaccattcagctgaaagcgtgccgcaccagcaccgcggtggtggtgaacaccgtggcgagcgaaaacccggatgaagcgggccgctatagcatggatgtggaacagggccagtataccgtgaccctgctggtggaaggctatccgccgagcccggcgggcgtgattaccgtgtatgtggatagcaaaccgggcaccctgaacgattttctgggcgcgatgaccgaagatgatgtgcgcccggaagcgctgcgccgctttgaagcgatggtggaagaagtggcgcgccaggcgagcgaagcgagccgcaacgcgaccgcggcgggccaggcgagcgaacaggcg

SEQ ID NO: 698 - DNA, 399 bp, Escherichia coli
agcattaaaattagcggcattctgccgggcccgaccggcgaaccggcggcgcatattggcattaccctgcgcgcgattaaaaccagcctgaccgtgattaccaccctggaaagcaacagcattaccggcaccgatggcgcgtatagcctgaacgtggaaccgggcaaatatgatgtgctgctgtgggtggatggcattaacgcgcgccgcgtgggcaccattaacgtgtatagcgatagcctgccgggcaccctgaacaactttctgaccgcgctgcgcgaagaagatggcaccccggaaattattctgcagctggaacagctgcgcgcggaagcggtgcgcgcggcgctggaagcgaaagaaagcaaaaacgaagcgacccagcaggcgggcattgcg

SEQ ID NO: 699 - DNA, 399 bp, Escherichia coli
agcgtggtggtgagcggcaccctgaaaagcccggatggcgaagcgattagcggcgcgaacattaccctgaccgcgctgaccgtgagcccggatgcgctgagcggcaccagcgcgagcgcggtgacccgcgaaggcggctattatggcatgaccatggatccgggcgaatatgcggtgagcgtgaccgtgaaaggcaaaaccgtggtgtatggccgcgtgcgcattgaaggcaccgaaagcaccgtgaccctgaacatgctgctgcgccgcagcctggtggaagtgagcattccgggcgaactgctgaccgattttcgccagattcagaacaacgtggcggatgatctggcgaccattcgccgcctgaacgaagataccgcgaccaaaaacacccaggcg

SEQ ID NO: 700 - DNA, 399 bp, Escherichia coli
agcgtggtggtgagcggcaccctgaaaagcccggatggcgaagcgattagcggcgcgaacattaccctgaccgcgctgaccgtgagcccggatgcgctgagcggcaccagcgcgagcgcggtgacccgcgaaggcggctattatggcatgaccatggatccgggcgaatatgcggtgagcgtgaccgtgaaaggcaaaaccgcggtgtatggccgcgtgcgcattgaaggcaccgaaagcaccgtgaccctgaacatgctgctgcgccgcagcctggtggaagtgagcattccgggcgaactgctgaccgattttcgccagattcagaacaacgtggcggatgatctggcgaccattcgccgcctgaacgaagataccgcgaccaaaaacacccaggcg

SEQ ID NO: 701 - DNA, 399 bp, Escherichia coli
agcgtggtggtgagcggcaccctgaaaagcccggatggcgaagcgattagcggcgcgaacattaccctgaccgcgctgaccgtgagcccggatgcgctgagcggcaccagcgcgagcgcggtgacccgcgaaggcggctattatggcatgaccatggatccgggcgaatatgcggtgagcgtgaccgtgaaaggcaaaaccgcggtgtatggccgcgtgcgcattgaaggcaccgaaagcaccgtgaccctgaacatgctgctgcgccgcagcctggtggaagtgagcattccgggcgaactgctgaccgattttcgccagattcagaacaacgtggcggatgatctggcgaccattcgccgcctgaacgaagataccgcgaccaaaaacaacagcggc

SEQ ID NO: 702 - DNA, 399 bp, Escherichia coli
agcgtggtggtgagcggcaccctgaaaagcccggatggcgaagcgattagcggcgcgaacattaccctgaccgcgctgaccgtgagcccggatgcgctgagcggcaccagcgcgagcgcggtgacccgcgatggcggctattatggcatgaccctggaaccgggcgaatatgcggtgagcgtgaccgtgaaaggcaaaaccgcggtgtatggccgcgtgcgcattgaaggcaccgaaagcaccgtgaccctgaacatgctgctgcgccgcagcctggtggaagtgagcattccgggcgaactgctgaccgattttcgccagattcagaacaacgtggcggatgatctggcgaccattcgccgcctgaacgaagataccgcggtgaaaaacaaccaggcg

SEQ ID NO: 703 - DNA, 390 bp, Escherichia coli
agcgtggtggtgagcggcaccctgaaaagcccggatggccaggtggtgagcgatgcgaacattaccctgaccgcgctgaccgtgagcccggatgcgctgagcggcaccagcgcgagcgcggtgaccaccagcaccggctattatggcatgaccatggaaccgggcgaatatgcggtgagcgtgaccgtgcgcggcaaaagccaggtgtatggccgcgtgcgcattgatggcaccgaaagcagcgtgaccctgaacatgctgctgcgccgcagcctggtggaagtgagcattagcgatgaactgctgaccgattttcgccagattcagaacaacgtggcggatgatctgaccaccattcgcgaactgaaagaagaaagcgtgaaaaacaac

SEQ ID NO: 704 - DNA, 399 bp, Escherichia coli
agcattctggtgagcggcattctgaaaagcccggcgggcgcgattattgcgggcgcgcagattaccctgaccgcgctgaccaccagcccggatctgctggcgggcgtgagcgcgagcgcggtgaccagcgataccggctattatggcatgaacgtgctgccgggcgtgtatagcctgaccgtggcggtgaacggcaaaagccaggtgtatggcagctttcgcctggatggcaccgaaaccaccgtgaccctgaacatggtgctgcgccgcaacctggtggaagtgagcattccggatgaactgctggtggattttcgccagattcagaacaacgtggcggatgatctggaaaccattcgccagctggaactgcgcgcgagcggcagcgcggataacgcg

SEQ ID NO: 705 - DNA, 390 bp, Escherichia coli
attagcggcgtgctgctggatccgagcggcaaagcggtgagcggcgcgcagattaccctgaccgcgattgcgaacagcatgcaggtgctgcgcggctttacctgcagcgtgatgaccgcggaaaacggccagtatagcgtgcgcctggaagaaggcaactatagcattagcgtggcgcatcagggccgcaactttgtgtatggcgcggtgaccctgaccgaagatagcgcgccgagcagcctgaacgcgctgctgcatcagcaggtgatggaacaggaagtgaccccggaagtgattctgtattttcgccagattcagcataaagtggcggatgatgtggtgattatgcagcgcctgcagcatgatagcagccaggcggcgcgcgcggcg

SEQ ID NO: 706 - DNA, 399 bp, Escherichia coli
agcgtgaccgtgagcggcattatgattaacccggtgggcgaaccggtggtgaacgcgcagattaccctgaccgcggtgaccaacagcctgaccgtgctgaacgcgtttagcgcgaccgtgcgcaccgatggcgtgggcacctatcgcattcagctggaagaaggcagctatagcattaccgtggcggcgaacggccgcagctttgtgtatggcgcggtgaccctggataacaccaccggcccgagcaccctgaaccagctgctgaaacagcagattatggaaagcgaactgaccccggatgtgattctgtattttcgccagattcagcagcaggtggcgaacgatctggcgaccattaaagtgctggaaattagcgcgaccgatgcggcggaaagcgcg

SEQ ID NO: 707 - DNA, 399 bp, Artificial Sequence
  PfN-CNA01
  misc_feature (3)..(3): n is a, c, g, or t
  misc_feature (6)..(6): n is a, c, g, or t
  misc_feature (15)..(15): n is a, c, g, or t
  misc_feature (18)..(18): n is a, c, g, or t
  misc_feature (21)..(21): n is a, c, g, or t
  misc_feature (24)..(24): n is a, c, g, or t
  misc_feature (33)..(33): n is a, c, g, or t
  misc_feature (36)..(36): n is a, c, g, or t
  misc_feature (39)..(39): n is a, c, g, or t
  misc_feature (45)..(45): n is a, c, g, or t
  misc_feature (48)..(48): n is a, c, g, or t
  misc_feature (51)..(51): n is a, c, g, or t
  misc_feature (60)..(60): n is a, c, g, or t
  misc_feature (69)..(69): n is a, c, g, or t
  misc_feature (72)..(72): n is a, c, g, or t
  misc_feature (75)..(75): n is a, c, g, or t
  misc_feature (78)..(78): n is a, c, g, or t
  misc_feature (81)..(81): n is a, c, g, or t
  misc_feature (84)..(84): n is a, c, g, or t
  misc_feature (87)..(87): n is a, c, g, or t
  misc_feature (90)..(90): n is a, c, g, or t
  misc_feature (93)..(93): n is a, c, g, or t
  misc_feature (96)..(96): n is a, c, g, or t
  misc_feature (99)..(99): n is a, c, g, or t
  misc_feature (102)..(102): n is a, c, g, or t
  misc_feature (108)..(108): n is a, c, g, or t
  misc_feature (111)..(111): n is a, c, g, or t
  misc_feature (114)..(114): n is a, c, g, or t
  misc_feature (117)..(117): n is a, c, g, or t
  misc_feature (123)..(123): n is a, c, g, or t
  misc_feature (126)..(126): n is a, c, g, or t
  misc_feature (138)..(138): n is a, c, g, or t
  misc_feature (141)..(141): n is a, c, g, or t
  misc_feature (147)..(147): n is a, c, g, or t
  misc_feature (156)..(156): n is a, c, g, or t
  misc_feature (162)..(162): n is a, c, g, or t
  misc_feature (165)..(165): n is a, c, g, or t
  misc_feature (177)..(177): n is a, c, g, or t
  misc_feature (180)..(180): n is a, c, g, or t
  misc_feature (183)..(183): n is a, c, g, or t
  misc_feature (195)..(195): n is a, c, g, or t
  misc_feature (204)..(204): n is a, c, g, or t
  misc_feature (207)..(207): n is a, c, g, or t
  misc_feature (210)..(210): n is a, c, g, or t
  misc_feature (213)..(213): n is a, c, g, or t
  misc_feature (216)..(216): n is a, c, g, or t
  misc_feature (228)..(228): n is a, c, g, or t
  misc_feature (231)..(231): n is a, c, g, or t
  misc_feature (234)..(234): n is a, c, g, or t
  misc_feature (237)..(237): n is a, c, g, or t
  misc_feature (243)..(243): n is a, c, g, or t
  misc_feature (246)..(246): n is a, c, g, or t
  misc_feature (249)..(249): n is a, c, g, or t
  misc_feature (252)..(252): n is a, c, g, or t
  misc_feature (255)..(255): n is a, c, g, or t
  misc_feature (261)..(261): n is a, c, g, or t
  misc_feature (267)..(267): n is a, c, g, or t
  misc_feature (273)..(273): n is a, c, g, or t
  misc_feature (276)..(276): n is a, c, g, or t
  misc_feature (285)..(285): n is a, c, g, or t
  misc_feature (291)..(291): n is a, c, g, or t
  misc_feature (294)..(294): n is a, c, g, or t
  misc_feature (297)..(297): n is a, c, g, or t
  misc_feature (303)..(303): n is a, c, g, or t
  misc_feature (312)..(312): n is a, c, g, or t
  misc_feature (327)..(327): n is a, c, g, or t
  misc_feature (330)..(330): n is a, c, g, or t
  misc_feature (336)..(336): n is a, c, g, or t
  misc_feature (345)..(345): n is a, c, g, or t
  misc_feature (348)..(348): n is a, c, g, or t
  misc_feature (351)..(351): n is a, c, g, or t
  misc_feature (354)..(354): n is a, c, g, or t
  misc_feature (357)..(357): n is a, c, g, or t
  misc_feature (360)..(360): n is a, c, g, or t
  misc_feature (363)..(363): n is a, c, g, or t
  misc_feature (369)..(369): n is a, c, g, or t
  misc_feature (378)..(378): n is a, c, g, or t
  misc_feature (381)..(381): n is a, c, g, or t
  misc_feature (390)..(390): n is a, c, g, or t
  misc_feature (393)..(393): n is a, c, g, or t
  misc_feature (396)..(396): n is a, c, g, or t
  misc_feature (399)..(399): n is a, c, g, or t
gcngtnaarathwsnggngtnytnaargayggngcnggnaarccngtngtnaaytgygcnathgarytnmgngcnmgnmgnacnwsnccnacngtngtngcncaygtngtngcnacntgygtnacngayaayaayggngcntaygtnathgargcngarccnggntaytaygargtngcnytncaytgyaayggntggcarccnacnmgngtnggngayathgaygtngcnccnacngaygcnccnggnacnytnaaygcnttyytnaaygcnccnaargayggngayytnmgnccngargtnatgaarmgnttygargaratggtngcncargcncarcarwsngcnggngcngcngcnggnaaygcncarcaracngcncargaygtngcnccngcn

SEQ ID NO: 708 - DNA, 399 bp, Artificial Sequence
  PfN-CNA02
  misc_feature (3)..(3): n is a, c, g, or t
  misc_feature (6)..(6): n is a, c, g, or t
  misc_feature (15)..(15): n is a, c, g, or t
  misc_feature (18)..(18): n is a, c, g, or t
  misc_feature (21)..(21): n is a, c, g, or t
  misc_feature (24)..(24): n is a, c, g, or t
  misc_feature (33)..(33): n is a, c, g, or t
  misc_feature (36)..(36): n is a, c, g, or t
  misc_feature (39)..(39): n is a, c, g, or t
  misc_feature (45)..(45): n is a, c, g, or t
  misc_feature (48)..(48): n is a, c, g, or t
  misc_feature (51)..(51): n is a, c, g, or t
  misc_feature (60)..(60): n is a, c, g, or t
  misc_feature (69)..(69): n is a, c, g, or t
  misc_feature (72)..(72): n is a, c, g, or t
  misc_feature (75)..(75): n is a, c, g, or t
  misc_feature (78)..(78): n is a, c, g, or t
  misc_feature (81)..(81): n is a, c, g, or t
  misc_feature (84)..(84): n is a, c, g, or t
  misc_feature (87)..(87): n is a, c, g, or t
  misc_feature (90)..(90): n is a, c, g, or t
  misc_feature (93)..(93): n is a, c, g, or t
  misc_feature (96)..(96): n is a, c, g, or t
  misc_feature (99)..(99): n is a, c, g, or t
  misc_feature (102)..(102): n is a, c, g, or t
  misc_feature (108)..(108): n is a, c, g, or t
  misc_feature (111)..(111): n is a, c, g, or t
  misc_feature (114)..(114): n is a, c, g, or t
  misc_feature (117)..(117): n is a, c, g, or t
  misc_feature (123)..(123): n is a, c, g, or t
  misc_feature (126)..(126): n is a, c, g, or t
  misc_feature (138)..(138): n is a, c, g, or t
  misc_feature (141)..(141): n is a, c, g, or t
  misc_feature (147)..(147): n is a, c, g, or t
  misc_feature (156)..(156): n is a, c, g, or t
  misc_feature (162)..(162): n is a, c, g, or t
  misc_feature (165)..(165): n is a, c, g, or t
  misc_feature (177)..(177): n is a, c, g, or t
  misc_feature (180)..(180): n is a, c, g, or t
  misc_feature (183)..(183): n is a, c, g, or t
  misc_feature (195)..(195): n is a, c, g, or t
  misc_feature (204)..(204): n is a, c, g, or t
  misc_feature (207)..(207): n is a, c, g, or t
  misc_feature (210)..(210): n is a, c, g, or t
  misc_feature (213)..(213): n is a, c, g, or t
  misc_feature (216)..(216): n is a, c, g, or t
  misc_feature (228)..(228): n is a, c, g, or t
  misc_feature (231)..(231): n is a, c, g, or t
  misc_feature (234)..(234): n is a, c, g, or t
  misc_feature (237)..(237): n is a, c, g, or t
  misc_feature (243)..(243): n is a, c, g, or t
  misc_feature (246)..(246): n is a, c, g, or t
  misc_feature (249)..(249): n is a, c, g, or t
  misc_feature (252)..(252): n is a, c, g, or t
  misc_feature (255)..(255): n is a, c, g, or t
  misc_feature (261)..(261): n is a, c, g, or t
  misc_feature (267)..(267): n is a, c, g, or t
  misc_feature (273)..(273): n is a, c, g, or t
  misc_feature (276)..(276): n is a, c, g, or t
  misc_feature (285)..(285): n is a, c, g, or t
  misc_feature (291)..(291): n is a, c, g, or t
  misc_feature (294)..(294): n is a, c, g, or t
  misc_feature (297)..(297): n is a, c, g, or t
  misc_feature (303)..(303): n is a, c, g, or t
  misc_feature (312)..(312): n is a, c, g, or t
  misc_feature (327)..(327): n is a, c, g, or t
  misc_feature (330)..(330): n is a, c, g, or t
  misc_feature (336)..(336): n is a, c, g, or t
  misc_feature (345)..(345): n is a, c, g, or t
  misc_feature (348)..(348): n is a, c, g, or t
  misc_feature (351)..(351): n is a, c, g, or t
  misc_feature (354)..(354): n is a, c, g, or t
  misc_feature (357)..(357): n is a, c, g, or t
  misc_feature (360)..(360): n is a, c, g, or t
  misc_feature (363)..(363): n is a, c, g, or t
  misc_feature (369)..(369): n is a, c, g, or t
  misc_feature (378)..(378): n is a, c, g, or t
  misc_feature (381)..(381): n is a, c, g, or t
  misc_feature (390)..(390): n is a, c, g, or t
  misc_feature (393)..(393): n is a, c, g, or t
  misc_feature (396)..(396): n is a, c, g, or t
  misc_feature (399)..(399): n is a, c, g, or t
gcngtnaarathwsnggngtnytnaargayggngcnggnaarccngtngtnaaytgygcnathgarytnmgngcnmgnmgnacnwsnccnacngtngtngcncaygtngtngcnacntgygtnacngayaayaayggngcntaygtnathgargcngarccnggntaytaygargtngcnytncaytgyaayggntggcarccnacnmgngtnggngayathgaygtngcnccnacngaygcnccnggnacnytnaaygcnttyytnaaygcnccnaargayggngayytnmgnccngargtnatgaarmgnttygargaratggtngcncargcncarcarwsngcnggngcngcngcnggnaaygcncarcaracngcncargaygtngcngcngcn

SEQ ID NO: 709 - DNA, 399 bp, Artificial Sequence
  PfN-CNA03
  misc_feature (3)..(3): n is a, c, g, or t
  misc_feature (6)..(6): n is a, c, g, or t
  misc_feature (15)..(15): n is a, c, g, or t
  misc_feature (18)..(18): n is a, c, g, or t
  misc_feature (21)..(21): n is a, c, g, or t
  misc_feature (24)..(24): n is a, c, g, or t
  misc_feature (33)..(33): n is a, c, g, or t
  misc_feature (36)..(36): n is a, c, g, or t
  misc_feature (39)..(39): n is a, c, g, or t
  misc_feature (45)..(45): n is a, c, g, or t
  misc_feature (48)..(48): n is a, c, g, or t
  misc_feature (51)..(51): n is a, c, g, or t
  misc_feature (60)..(60): n is a, c, g, or t
  misc_feature (69)..(69): n is a, c, g, or t
  misc_feature (72)..(72): n is a, c, g, or t
  misc_feature (75)..(75): n is a, c, g, or t
  misc_feature (78)..(78): n is a, c, g, or t
  misc_feature (81)..(81): n is a, c, g, or t
  misc_feature (84)..(84): n is a, c, g, or t
  misc_feature (87)..(87): n is a, c, g, or t
  misc_feature (90)..(90): n is a, c, g, or t
  misc_feature (93)..(93): n is a, c, g, or t
  misc_feature (96)..(96): n is a, c, g, or t
  misc_feature (99)..(99): n is a, c, g, or t
  misc_feature (102)..(102): n is a, c, g, or t
  misc_feature (108)..(108): n is a, c, g, or t
  misc_feature (111)..(111): n is a, c, g, or t
  misc_feature (114)..(114): n is a, c, g, or t
  misc_feature (117)..(117): n is a, c, g, or t
  misc_feature (123)..(123): n is a, c, g, or t
  misc_feature (126)..(126): n is a, c, g, or t
  misc_feature (138)..(138): n is a, c, g, or t
  misc_feature (141)..(141): n is a, c, g, or t
  misc_feature (147)..(147): n is a, c, g, or t
  misc_feature (156)..(156): n is a, c, g, or t
  misc_feature (162)..(162): n is a, c, g, or t
  misc_feature (165)..(165): n is a, c, g, or t
  misc_feature (177)..(177): n is a, c, g, or t
  misc_feature (180)..(180): n is a, c, g, or t
  misc_feature (183)..(183): n is a, c, g, or t
  misc_feature (195)..(195): n is a, c, g, or t
  misc_feature (204)..(204): n is a, c, g, or t
  misc_feature (207)..(207): n is a, c, g, or t
  misc_feature (210)..(210): n is a, c, g, or t
  misc_feature (213)..(213): n is a, c, g, or t
  misc_feature (216)..(216): n is a, c, g, or t
  misc_feature (228)..(228): n is a, c, g, or t
  misc_feature (231)..(231): n is a, c, g, or t
  misc_feature (234)..(234): n is a, c, g, or t
  misc_feature (237)..(237): n is a, c, g, or t
  misc_feature (243)..(243): n is a, c, g, or t
  misc_feature (246)..(246): n is a, c, g, or t
  misc_feature (249)..(249): n is a, c, g, or t
  misc_feature (252)..(252): n is a, c, g, or t
  misc_feature (255)..(255): n is a, c, g, or t
  misc_feature (261)..(261): n is a, c, g, or t
  misc_feature (267)..(267): n is a, c, g, or t
  misc_feature (273)..(273): n is a, c, g, or t
  misc_feature (276)..(276): n is a, c, g, or t
  misc_feature (285)..(285): n is a, c, g, or t
  misc_feature (291)..(291): n is a, c, g, or t
  misc_feature (294)..(294): n is a, c, g, or t
  misc_feature (297)..(297): n is a, c, g, or t
  misc_feature (303)..(303): n is a, c, g, or t
  misc_feature (312)..(312): n is a, c, g, or t
  misc_feature (327)..(327): n is a, c, g, or t
  misc_feature (330)..(330): n is a, c, g, or t
  misc_feature (336)..(336): n is a, c, g, or t
  misc_feature (345)..(345): n is a, c, g, or t
  misc_feature (348)..(348): n is a, c, g, or t
  misc_feature (351)..(351): n is a, c, g, or t
  misc_feature (354)..(354): n is a, c, g, or t
  misc_feature (357)..(357): n is a, c, g, or t
  misc_feature (360)..(360): n is a, c, g, or t
  misc_feature (363)..(363): n is a, c, g, or t
  misc_feature (369)..(369): n is a, c, g, or t
  misc_feature (378)..(378): n is a, c, g, or t
  misc_feature (381)..(381): n is a, c, g, or t
  misc_feature (390)..(390): n is a, c, g, or t
  misc_feature (393)..(393): n is a, c, g, or t
  misc_feature (396)..(396): n is a, c, g, or t
  misc_feature (399)..(399): n is a, c, g, or t
gcngtnaarathwsnggngtnytnaargayggngcnggnaarccngtngtnaaytgygcnathgarytnmgngcnmgnmgnacnwsnccnacngtngtngcncaygtngtngcnacntgygtnacngayaayaayggngcntaygtnathgargcngarccnggntaytaygargtngcnytncaytgyaayggntggcarccnacnmgngtnggngayathgaygtngcnccnacngaygcnccnggnacnytnaaygcnttyytnaaygcnccnaargayggngayytnmgnccngargtnatgaarmgnttygargaratggtngcncargcncarcarwsngcnggnwsngcngcnggnaaygcncarcaracngcncargaygtngcngcngcn

SEQ ID NO: 710 - DNA, 399 bp, Artificial Sequence
  PfN-CNA04
  misc_feature (3)..(3): n is a, c, g, or t
  misc_feature (6)..(6): n is a, c, g, or t
  misc_feature (15)..(15): n is a, c, g, or t
  misc_feature (18)..(18): n is a, c, g, or t
  misc_feature (21)..(21): n is a, c, g, or t
  misc_feature (24)..(24): n is a, c, g, or t
  misc_feature (33)..(33): n is a, c, g, or t
  misc_feature (36)..(36): n is a, c, g, or t
  misc_feature (39)..(39): n is a, c, g, or t
  misc_feature (45)..(45): n is a, c, g, or t
  misc_feature (48)..(48): n is a, c, g, or t
  misc_feature (51)..(51): n is a, c, g, or t
  misc_feature (60)..(60): n is a, c, g, or t
  misc_feature (69)..(69): n is a, c, g, or t
  misc_feature (72)..(72): n is a, c, g, or t
  misc_feature (75)..(75): n is a, c, g, or t
  misc_feature (78)..(78): n is a, c, g, or t
  misc_feature (81)..(81): n is a, c, g, or t
  misc_feature (84)..(84): n is a, c, g, or t
  misc_feature (87)..(87): n is a, c, g, or t
  misc_feature (90)..(90): n is a, c, g, or t
  misc_feature (93)..(93): n is a, c, g, or t
  misc_feature (96)..(96): n is a, c, g, or t
  misc_feature (99)..(99): n is a, c, g, or t
  misc_feature (102)..(102): n is a, c, g, or t
  misc_feature (108)..(108): n is a, c, g, or t
  misc_feature (111)..(111): n is a, c, g, or t
  misc_feature (114)..(114): n is a, c, g, or t
  misc_feature (117)..(117): n is a, c, g, or t
  misc_feature (123)..(123): n is a, c, g, or t
  misc_feature (126)..(126): n is a, c, g, or t
  misc_feature (138)..(138): n is a, c, g, or t
  misc_feature (141)..(141): n is a, c, g, or t
  misc_feature (147)..(147): n is a, c, g, or t
  misc_feature (156)..(156): n is a, c, g, or t
  misc_feature (162)..(162): n is a, c, g, or t
  misc_feature (165)..(165): n is a, c, g, or t
  misc_feature (177)..(177): n is a, c, g, or t
  misc_feature (180)..(180): n is a, c, g, or t
  misc_feature (183)..(183): n is a, c, g, or t
  misc_feature (195)..(195): n is a, c, g, or t
  misc_feature (204)..(204): n is a, c, g, or t
  misc_feature (207)..(207): n is a, c, g, or t
  misc_feature (210)..(210): n is a, c, g, or t
  misc_feature (213)..(213): n is a, c, g, or t
  misc_feature (216)..(216): n is a, c, g, or t
  misc_feature (228)..(228): n is a, c, g, or t
  misc_feature (231)..(231): n is a, c, g, or t
  misc_feature (234)..(234): n is a, c, g, or t
  misc_feature (237)..(237): n is a, c, g, or t
  misc_feature (243)..(243): n is a, c, g, or t
  misc_feature (246)..(246): n is a, c, g, or t
  misc_feature (249)..(249): n is a, c, g, or t
  misc_feature (252)..(252): n is a, c, g, or t
  misc_feature (255)..(255): n is a, c, g, or t
  misc_feature (261)..(261): n is a, c, g, or t
  misc_feature (267)..(267): n is a, c, g, or t
  misc_feature (273)..(273): n is a, c, g, or t
  misc_feature (276)..(276): n is a, c, g, or t
  misc_feature (285)..(285): n is a, c, g, or t
  misc_feature (291)..(291): n is a, c, g, or t
  misc_feature (294)..(294): n is a, c, g, or t
  misc_feature (297)..(297): n is a, c, g, or t
  misc_feature (303)..(303): n is a, c, g, or t
  misc_feature (312)..(312): n is a, c, g, or t
  misc_feature (327)..(327): n is a, c, g, or t
  misc_feature (330)..(330): n is a, c, g, or t
  misc_feature (336)..(336): n is a, c, g, or t
  misc_feature (345)..(345): n is a, c, g, or t
  misc_feature (348)..(348): n is a, c, g, or t
  misc_feature (351)..(351): n is a, c, g, or t
  misc_feature (354)..(354): n is a, c, g, or t
  misc_feature (357)..(357): n is a, c, g, or t
  misc_feature (360)..(360): n is a, c, g, or t
  misc_feature (363)..(363): n is a, c, g, or t
  misc_feature (369)..(369): n is a, c, g, or t
  misc_feature (378)..(378): n is a, c, g, or t
  misc_feature (381)..(381): n is a, c, g, or t
  misc_feature (390)..(390): n is a, c, g, or t
  misc_feature (393)..(393): n is a, c, g, or t
  misc_feature (396)..(396): n is a, c, g, or t
  misc_feature (399)..(399): n is a, c, g, or t
gcngtnaarathwsnggngtnytnaargayggngcnggnaarccngtngtnaaytgygcnathgarytnmgngcnmgnmgnacnwsnccnacngtngtngcncaygtngtngcnacntgygtnacngayaayaayggngcntaygtnathgargcngarccnggntaytaygargtngcnytncaytgyaayggntggcarccnacnmgngtnggngayathgaygtngcnccnacngaygcnccnggnacnytnaaygcnttyytnaaygcnccnaargayggngayytnmgnccngargtnatgaarmgnttygargaratggtngtncargcncarcarwsngcnggngcngcngcnggnaaygcncarcaracngcncargaygtngcngcngcn

SEQ ID NO: 711 - DNA, 399 bp, Artificial Sequence
  PfN-CNA05
  misc_feature (3)..(3): n is a, c, g, or t
  misc_feature (6)..(6): n is a, c, g, or t
  misc_feature (9)..(9): n is a, c, g, or t
  misc_feature (18)..(18): n is a, c, g, or t
  misc_feature (21)..(21): n is a, c, g, or t
  misc_feature (24)..(24): n is a, c, g, or t
  misc_feature (27)..(27): n is a, c, g, or t
  misc_feature (33)..(33): n is a, c, g, or t
  misc_feature (36)..(36): n is a, c, g, or t
  misc_feature (39)..(39): n is a, c, g, or t
  misc_feature (45)..(45): n is a, c, g, or t
  misc_feature (51)..(51): n is a, c, g, or t
  misc_feature (54)..(54): n is a, c, g, or t
  misc_feature (69)..(69): n is a, c, g, or t
  misc_feature (75)..(75): n is a, c, g, or t
  misc_feature (78)..(78): n is a, c, g, or t
  misc_feature (81)..(81): n is a, c, g, or t
  misc_feature (87)..(87): n is a, c, g, or t
  misc_feature (90)..(90): n is a, c, g, or t
  misc_feature (96)..(96): n is a, c, g, or t
  misc_feature (99)..(99): n is a, c, g, or t
  misc_feature (105)..(105): n is a, c, g, or t
  misc_feature (108)..(108): n is a, c, g, or t
  misc_feature (114)..(114): n is a, c, g, or t
  misc_feature (120)..(120): n is a, c, g, or t
  misc_feature (123)..(123): n is a, c, g, or t
  misc_feature (126)..(126): n is a, c, g, or t
  misc_feature (129)..(129): n is a, c, g, or t
  misc_feature (138)..(138): n is a, c, g, or t
  misc_feature (147)..(147): n is a, c, g, or t
  misc_feature (156)..(156): n is a, c, g, or t
  misc_feature (159)..(159): n is a, c, g, or t
  misc_feature (162)..(162): n is a, c, g, or t
  misc_feature (165)..(165): n is a, c, g, or t
  misc_feature (174)..(174): n is a, c, g, or t
  misc_feature (177)..(177): n is a, c, g, or t
  misc_feature (183)..(183): n is a, c, g, or t
  misc_feature (192)..(192): n is a, c, g, or t
  misc_feature (198)..(198): n is a, c, g, or t
  misc_feature (213)..(213): n is a, c, g, or t
  misc_feature (216)..(216): n is a, c, g, or t
  misc_feature (225)..(225): n is a, c, g, or t
  misc_feature (228)..(228): n is a, c, g, or t
  misc_feature (240)..(240): n is a, c, g, or t
  misc_feature (246)..(246): n is a, c, g, or t
  misc_feature (249)..(249): n is a, c, g, or t
  misc_feature (252)..(252): n is a, c, g, or t
  misc_feature (255)..(255): n is a, c, g, or t
  misc_feature (267)..(267): n is a, c, g, or t
  misc_feature (270)..(270): n is a, c, g, or t
  misc_feature (273)..(273): n is a, c, g, or t
  misc_feature (276)..(276): n is a, c, g, or t
  misc_feature (285)..(285): n is a, c, g, or t
  misc_feature (291)..(291): n is a, c, g, or t
  misc_feature (297)..(297): n is a, c, g, or t
  misc_feature (303)..(303): n is a, c, g, or t
  misc_feature (306)..(306): n is a, c, g, or t
  misc_feature (312)..(312): n is a, c, g, or t
  misc_feature (321)..(321): n is a, c, g, or t
  misc_feature (327)..(327): n is a, c, g, or t
  misc_feature (330)..(330): n is a, c, g, or t
  misc_feature (336)..(336): n is a, c, g, or t
  misc_feature (345)..(345): n is a, c, g, or t
  misc_feature (348)..(348): n is a, c, g, or t
  misc_feature (354)..(354): n is a, c, g, or t
  misc_feature (357)..(357): n is a, c, g, or t
  misc_feature (360)..(360): n is a, c, g, or t
  misc_feature (366)..(366): n is a, c, g, or t
  misc_feature (378)..(378): n is a, c, g, or t
  misc_feature (381)..(381): n is a, c, g, or t
  misc_feature (390)..(390): n is a, c, g, or t
  misc_feature (393)..(393): n is a, c, g, or t
  misc_feature (399)..(399): n is a, c, g, or t
wsngtnytnathtayggngcnytnacngayggngcnggnathccnatgwsnggntgycayathathytnaarwsnmgngtnaayacnwsngargtngtnatgmgnacngargcngaygtngtnacnggnaayaayggngartaywsnttygargcnmgnacnggnaartaymgngtntayytnaarcarggntggmgngaygartaytgygtnggngayathgcngtntaygaygaygcnaarccnggnacnytnaaygayttyytnacngcnccngaygarggngayytnaarccngaygtngtnaarmgnttygarmgnatggtngcncargcncarcarwsngcngarwsngcngcngarwsngarcarcargcnggncarcaygtngcngaygcn

SEQ ID NO: 712 - DNA, 399 bp, Artificial Sequence
  PfN-CNA06
  misc_feature (3)..(3): n is a, c, g, or t
  misc_feature (6)..(6): n is a, c, g, or t
  misc_feature (9)..(9): n is a, c, g, or t
  misc_feature (15)..(15): n is a, c, g, or t
  misc_feature (18)..(18): n is a, c, g, or t
  misc_feature (21)..(21): n is a, c, g, or t
  misc_feature (24)..(24): n is a, c, g, or t
  misc_feature (33)..(33): n is a, c, g, or t
  misc_feature (36)..(36): n is a, c, g, or t
  misc_feature (39)..(39): n is a, c, g, or t
  misc_feature (45)..(45): n is a, c, g, or t
  misc_feature (51)..(51): n is a, c, g, or t
  misc_feature (54)..(54): n is a, c, g, or t
  misc_feature (69)..(69): n is a, c, g, or t
  misc_feature (75)..(75): n is a, c, g, or t
  misc_feature (78)..(78): n is a, c, g, or t
  misc_feature (81)..(81): n is a, c, g, or t
  misc_feature (87)..(87): n is a, c, g, or t
  misc_feature (90)..(90): n is a, c, g, or t
  misc_feature (96)..(96): n is a, c, g, or t
  misc_feature (99)..(99): n is a, c, g, or t
  misc_feature (105)..(105): n is a, c, g, or t
  misc_feature (108)..(108): n is a, c, g, or t
  misc_feature (111)..(111): n is a, c, g, or t
  misc_feature (114)..(114): n is a, c, g, or t
  misc_feature (120)..(120): n is a, c, g, or t
  misc_feature (123)..(123): n is a, c, g, or t
  misc_feature (126)..(126): n is a, c, g, or t
  misc_feature (129)..(129): n is a, c, g, or t
  misc_feature (138)..(138): n is a, c, g, or t
  misc_feature (156)..(156): n is a, c, g, or t
  misc_feature (162)..(162): n is a, c, g, or t
  misc_feature (165)..(165): n is a, c, g, or t
  misc_feature (177)..(177): n is a, c, g, or t
  misc_feature (183)..(183): n is a, c, g, or t
  misc_feature (198)..(198): n is a, c, g, or t
  misc_feature (213)..(213): n is a, c, g, or t
  misc_feature (216)..(216): n is a, c, g, or t
  misc_feature (225)..(225): n is a, c, g, or t
  misc_feature (228)..(228): n is a, c, g, or t
  misc_feature (240)..(240): n is a, c, g, or t
  misc_feature (243)..(243): n is a, c, g, or t
  misc_feature (246)..(246): n is a, c, g, or t
  misc_feature (249)..(249): n is a, c, g, or t
  misc_feature (252)..(252): n is a, c, g, or t
  misc_feature (255)..(255): n is a, c, g, or t
  misc_feature (267)..(267): n is a, c, g, or t
  misc_feature (270)..(270): n is a, c, g, or t
  misc_feature (273)..(273): n is a, c, g, or t
  misc_feature (276)..(276): n is a, c, g, or t
  misc_feature (285)..(285): n is a, c, g, or t
  misc_feature (291)..(291): n is a, c, g, or t
  misc_feature (297)..(297): n is a, c, g, or t
  misc_feature (303)..(303): n is a, c, g, or t
  misc_feature (306)..(306): n is a, c, g, or t
  misc_feature (312)..(312): n is a, c, g, or t
  misc_feature (327)..(327): n is a, c, g, or t
  misc_feature (330)..(330): n is a, c, g, or t
  misc_feature (336)..(336): n is a, c, g, or t
  misc_feature (345)..(345): n is a, c, g, or t
  misc_feature (348)..(348): n is a, c, g, or t
  misc_feature (354)..(354): n is a, c, g, or t
  misc_feature (357)..(357): n is a, c, g, or t
  misc_feature (360)..(360): n is a, c, g, or t
  misc_feature (366)..(366): n is a, c, g, or t
  misc_feature (372)..(372): n is a, c, g, or t
  misc_feature (378)..(378): n is a, c, g, or t
  misc_feature (381)..(381): n is a, c, g, or t
  misc_feature (390)..(390): n is a, c, g, or t
  misc_feature (393)..(393): n is a, c, g, or t
  misc_feature (399)..(399): n is a, c, g, or t
wsngtngtnathwsnggngcnytnathgayggngcnggnathccnatgwsnggntgycayathathytnaarwsnmgngtnaayacnwsngargtngtnatgmgnacngtngcngaygtngtnacnggnaaytgyggngartaytgyttyaargcncaracnggnaartaytgygtntayytnaarcargaytggmgngaygartaytgygtnggngayathgcngtntaygaygaywsnmgnccnggnacnytnaaygayttyytnacngcnytngaygarggngayytnaarccngaygtngtnaarmgnttygargaratggtngcncargcncarcarwsngcngargcngcngcngarwsngarmgncargcnggncarcaygcngcngaygcn

SEQ ID NO: 713 - DNA, 399 bp, Artificial Sequence
  PfN-CNA07
  misc_feature (3)..(3): n is a, c, g, or t
  misc_feature (6)..(6): n is a, c, g, or t
  misc_feature (9)..(9): n is a, c, g, or t
  misc_feature (15)..(15): n is a, c, g, or t
  misc_feature (18)..(18): n is a, c, g, or t
  misc_feature (21)..(21): n is a, c, g, or t
  misc_feature (24)..(24): n is a, c, g, or t
  misc_feature (27)..(27): n is a, c, g, or t
  misc_feature (33)..(33): n is a, c, g, or t
  misc_feature (36)..(36): n is a, c, g, or t
  misc_feature (39)..(39): n is a, c, g, or t
  misc_feature (45)..(45): n is a, c, g, or t
  misc_feature (51)..(51): n is a, c, g, or t
  misc_feature (54)..(54): n is a, c, g, or t
  misc_feature (69)..(69): n is a, c, g, or t
  misc_feature (75)..(75): n is a, c, g, or t
  misc_feature (78)..(78): n is a, c, g, or t
  misc_feature (81)..(81): n is a, c, g, or t
  misc_feature (87)..(87): n is a, c, g, or t
  misc_feature (90)..(90): n is a, c, g, or t
  misc_feature (96)..(96): n is a, c, g, or t
  misc_feature (99)..(99): n is a, c, g, or t
  misc_feature (108)..(108): n is a, c, g, or t
  misc_feature (111)..(111): n is a, c, g, or t
  misc_feature (114)..(114): n is a, c, g, or t
  misc_feature (120)..(120): n is a, c, g, or t
  misc_feature (126)..(126): n is a, c, g, or t
  misc_feature (129)..(129): n is a, c, g, or t
  misc_feature (138)..(138): n is a, c, g, or t
  misc_feature (156)..(156): n is a, c, g, or t
  misc_feature (159)..(159): n is a, c, g, or t
  misc_feature (162)..(162): n is a, c, g, or t
  misc_feature (165)..(165): n is a, c, g, or t
  misc_feature (174)..(174): n is a, c, g, or t
  misc_feature (177)..(177): n is a, c, g, or t
  misc_feature (183)..(183): n is a, c, g, or t
  misc_feature (213)..(213): n is a, c, g, or t
  misc_feature (216)..(216): n is a, c, g, or t
  misc_feature (225)..(225): n is a, c, g, or t
  misc_feature (228)..(228): n is a, c, g, or t
  misc_feature (240)..(240): n is a, c, g, or t
  misc_feature (246)..(246): n is a, c, g, or t
  misc_feature (249)..(249): n is a, c, g, or t
  misc_feature (252)..(252): n is a, c, g, or t
  misc_feature (255)..(255): n is a, c, g, or t
  misc_feature (267)..(267): n is a, c, g, or t
  misc_feature (273)..(273): n is a, c, g, or t
  misc_feature (276)..(276): n is a, c, g, or t
  misc_feature (285)..(285): n is a, c, g, or t
  misc_feature (291)..(291): n is a, c, g, or t
  misc_feature (297)..(297): n is a, c, g, or t
  misc_feature (303)..(303): n is a, c, g, or t
  misc_feature (306)..(306): n is a, c, g, or t
  misc_feature (312)..(312): n is a, c, g, or t
  misc_feature (327)..(327): n is a, c, g, or t
  misc_feature (330)..(330): n is a, c, g, or t
  misc_feature (336)..(336): n is a, c, g, or t
  misc_feature (345)..(345): n is a, c, g, or t
  misc_feature (348)..(348): n is a, c, g, or t
  misc_feature (351)..(351): n is a, c, g, or t
  misc_feature (354)..(354): n is a, c, g, or t
  misc_feature (357)..(357): n is a, c, g, or t
  misc_feature (360)..(360): n is a, c, g, or t
  misc_feature (363)..(363): n is a, c, g, or t
  misc_feature (369)..(369): n is a, c, g, or t
  misc_feature (378)..(378): n is a, c, g, or t
  misc_feature (381)..(381): n is a, c, g, or t
  misc_feature (390)..(390): n is a, c, g, or t
  misc_feature (393)..(393): n is a, c, g, or t
  misc_feature (396)..(396): n is a, c, g, or t
  misc_feature (399)..(399): n is a, c, g, or t
wsngtngtnathwsnggngcnytnacngayggngcnggnathccnatgwsnggntaycayathathytnaarwsnmgngtnaayacnmgngargtngtnatgcayacngtngcngaygtnatgacnggnaaygayggngartaytgyttycaygcnmgnacnggnaartayggngtntayytnaarcargaytggcayaaygartayaaygtnggngayathgcngtntaygargaywsnaarccnggnacnytnaaygayttyytnathgcnccngaygarggngayytnaarccngaygtngtnaarmgnttygargaratggtngcncargcncarcarwsngcnggngcngcngcnggnaaygcncarcaracngcncargaygtngcngcngcn

SEQ ID NO: 714 - DNA, 399 bp, Artificial Sequence
  PfN-CNA08
  misc_feature (3)..(3): n is a, c, g, or t
  misc_feature (6)..(6): n is a, c, g, or t
  misc_feature (9)..(9): n is a, c, g, or t
  misc_feature (15)..(15): n is a, c, g, or t
  misc_feature (18)..(18): n is a, c, g, or t
  misc_feature (21)..(21): n is a, c, g, or t
  misc_feature (24)..(24): n is a, c, g, or t
  misc_feature (27)..(27): n is a, c, g, or t
  misc_feature (33)..(33): n is a, c, g, or t
  misc_feature (36)..(36): n is a, c, g, or t
  misc_feature (39)..(39): n is a, c, g, or t
  misc_feature (45)..(45): n is a, c, g, or t
  misc_feature (51)..(51): n is a, c, g, or t
  misc_feature (54)..(54): n is a, c, g, or t
  misc_feature (69)..(69): n is a, c, g, or t
  misc_feature (75)..(75): n is a, c, g, or t
  misc_feature (78)..(78): n is a, c, g, or t
  misc_feature (81)..(81): n is a, c, g, or t
  misc_feature (87)..(87): n is a, c, g, or t
  misc_feature (90)..(90): n is a, c, g, or t
  misc_feature (96)..(96): n is a, c, g, or t
  misc_feature (99)..(99): n is a, c, g, or t
  misc_feature (108)..(108): n is a, c, g, or t
  misc_feature (111)..(111): n is a, c, g, or t
  misc_feature (114)..(114): n is a, c, g, or t
  misc_feature (120)..(120): n is a, c, g, or t
  misc_feature (126)..(126): n is a, c, g, or t
  misc_feature (129)..(129): n is a, c, g, or t
  misc_feature (138)..(138): n is a, c, g, or t
  misc_feature (156)..(156): n is a, c, g, or t
  misc_feature (159)..(159): n is a, c, g, or t
  misc_feature (162)..(162): n is a, c, g, or t
  misc_feature (165)..(165): n is a, c, g, or t
  misc_feature (174)..(174): n is a, c, g, or t
  misc_feature (177)..(177): n is a, c, g, or t
  misc_feature (183)..(183): n is a, c, g, or t
  misc_feature (213)..(213): n is a, c, g, or t
  misc_feature (216)..(216): n is a, c, g, or t
  misc_feature (225)..(225): n is a, c, g, or t
  misc_feature (228)..(228): n is a, c, g, or t
  misc_feature (240)..(240): n is a, c, g, or t
  misc_feature (246)..(246): n is a, c, g, or t
  misc_feature (249)..(249): n is a, c, g, or t
  misc_feature (252)..(252): n is a, c, g, or t
  misc_feature (255)..(255): n is a, c, g, or t
  misc_feature (267)..(267): n is a, c, g, or t
  misc_feature (273)..(273): n is a, c, g, or t
  misc_feature (276)..(276): n is a, c, g, or t
  misc_feature (285)..(285): n is a, c, g, or t
  misc_feature (291)..(291): n is a, c, g, or t
  misc_feature (297)..(297): n is a, c, g, or t
  misc_feature (303)..(303): n is a, c, g, or t
  misc_feature (306)..(306): n is a, c, g, or t
  misc_feature (312)..(312): n is a, c, g, or t
  misc_feature (327)..(327): n is a, c, g, or t
  misc_feature (330)..(330): n is a, c, g, or t
  misc_feature (336)..(336): n is a, c, g, or t
  misc_feature (345)..(345): n is a, c, g, or t
  misc_feature (348)..(348): n is a, c, g, or t
  misc_feature (351)..(351): n is a, c, g, or t
  misc_feature (354)..(354): n is a, c, g, or t
  misc_feature (357)..(357): n is a, c, g, or t
  misc_feature (360)..(360): n is a, c, g, or t
  misc_feature (363)..(363): n is a, c, g, or t
  misc_feature (369)..(369): n is a, c, g, or t
  misc_feature (378)..(378): n is a, c, g, or t
  misc_feature (381)..(381): n is a, c, g, or t
  misc_feature (390)..(390): n is a, c, g, or t
  misc_feature (393)..(393): n is a, c, g, or t
  misc_feature (396)..(396): n is a, c, g, or t
  misc_feature (399)..(399): n is a, c, g, or t
wsngtngtnathwsnggngcnytnacngayggngcnggnathwsnatgwsnggntaycayathathytnaarwsnmgngtnaayacnccngargtngtnatgcayacngtngcngaygtnatgacnggnaaygayggngartaytgyttycaygcnmgnacnggnaartayggngtntayytnaarcargaytggcayaaygartayaaygtnggngayathgcngtntaygargaywsnaarccnggnacnytnaaygayttyytnathgcnccngaygarggngayytnaarccngaygtngtnaarmgnttygargaratggtngcncargcncarcarwsngcnggngcngcngcnggnaaygcncarcaracngcncargaygtngcngcngcn

SEQ ID NO: 715 - DNA, 399 bp, Artificial Sequence
  PfN-CNA09
  misc_feature (3)..(3): n is a, c, g, or t
  misc_feature (6)..(6): n is a, c, g, or t
  misc_feature (9)..(9): n is a, c, g, or t
  misc_feature (15)..(15): n is a, c, g, or t
  misc_feature (18)..(18): n is a, c, g, or t
  misc_feature (21)..(21): n is a, c, g, or t
  misc_feature (24)..(24): n is a, c, g, or t
  misc_feature (27)..(27): n is a, c, g, or t
  misc_feature (33)..(33): n is a, c, g, or t
  misc_feature (36)..(36): n is a, c, g, or t
  misc_feature (39)..(39): n is a, c, g, or t
  misc_feature (45)..(45): n is a, c, g, or t
  misc_feature (51)..(51): n is a, c, g, or t
  misc_feature (54)..(54): n is a, c, g, or t
  misc_feature (69)..(69): n is a, c, g, or t
  misc_feature (75)..(75): n is a, c, g, or t
  misc_feature (78)..(78): n is a, c, g, or t
  misc_feature (81)..(81): n is a, c, g, or t
  misc_feature (87)..(87): n is a, c, g, or t
  misc_feature (90)..(90): n is a, c, g, or t
  misc_feature (96)..(96): n is a, c, g, or t
  misc_feature (99)..(99): n is a, c, g, or t
  misc_feature (108)..(108): n is a, c, g, or t
  misc_feature (111)..(111): n is a, c, g, or t
  misc_feature (114)..(114): n is a, c, g, or t
  misc_feature (120)..(120): n is a, c, g, or t
  misc_feature (126)..(126): n is a, c, g, or t
  misc_feature (129)..(129): n is a, c, g, or t
  misc_feature (138)..(138): n is a, c, g, or t
  misc_feature (156)..(156): n is a, c, g, or t
  misc_feature (159)..(159): n is a, c, g, or t
  misc_feature (162)..(162): n is a, c, g, or t
  misc_feature (165)..(165): n is a, c, g, or t
  misc_feature (174)..(174): n is a, c, g, or t
  misc_feature (177)..(177): n is a, c, g, or t
  misc_feature (183)..(183): n is a, c, g, or t
  misc_feature (198)..(198): n is a, c, g, or t
  misc_feature (213)..(213): n is a, c, g, or t
  misc_feature (216)..(216): n is a, c, g, or t
  misc_feature (225)..(225): n is a, c, g, or t
  misc_feature (228)..(228): n is a, c, g, or t
  misc_feature (240)..(240): n is a, c, g, or t
  misc_feature (246)..(246): n is a, c, g, or t
  misc_feature (249)..(249): n is a, c, g, or t
  misc_feature (252)..(252): n is a, c, g, or t
  misc_feature (255)..(255): n is a, c, g, or t
  misc_feature (267)..(267): n is a, c, g, or t
  misc_feature (273)..(273): n is a, c, g, or t
  misc_feature (276)..(276): n is a, c, g, or t
  misc_feature (285)..(285): n is a, c, g, or t
  misc_feature (291)..(291): n is a, c, g, or t
  misc_feature (297)..(297): n is a, c, g, or t
  misc_feature (303)..(303): n is a, c, g, or t
  misc_feature (306)..(306): n is a, c, g, or t
  misc_feature (312)..(312): n is a, c, g, or t
  misc_feature (327)..(327): n is a, c, g, or t
  misc_feature (330)..(330): n is a, c, g, or t
  misc_feature (336)..(336): n is a, c, g, or t
  misc_feature (345)..(345): n is a, c, g, or t
  misc_feature (348)..(348): n is a, c, g, or t
  misc_feature (351)..(351): n is a, c, g, or t
  misc_feature (354)..(354): n is a, c, g, or t
  misc_feature (357)..(357): n is a, c, g, or t
  misc_feature (360)..(360): n is a, c, g, or t
  misc_feature (363)..(363): n is a, c, g, or t
  misc_feature (369)..(369): n is a, c, g, or t
  misc_feature (378)..(378): n is a, c, g, or t
  misc_feature (381)..(381): n is a, c, g, or t
  misc_feature (390)..(390): n is a, c, g, or t
  misc_feature (393)..(393): n is a, c, g, or t
  misc_feature (396)..(396): n is a, c, g, or t
  misc_feature (399)..(399): n is a, c, g, or t
wsngtngtnathwsnggngcnytnacngayggngcnggnathccnatgwsnggntaycayathathytnaarwsnmgngtnaayacnccngargtngtnatgcayacngtngcngaygtnatgacnggnaaygayggngartaytgyttycaygcnmgnacnggnaartayggngtntayytnaarcargaytggmgnaaygartayaaygtnggngayathgcngtntaygargaywsnaarccnggnacnytnaaygayttyytnathgcnccngaygarggngayytnaarccngaygtngtnaarmgnttygargaratggtngcncargcncarcarwsngcnggngcngcngcnggnaaygcncarcaracngcncargaygtngcngcngcn

SEQ ID NO: 716 - DNA, 399 bp, Artificial Sequence
  PfN-CNA10
  misc_feature (3)..(3): n is a, c, g, or t
  misc_feature (6)..(6): n is a, c, g, or t
  misc_feature (9)..(9): n is a, c, g, or t
  misc_feature (15)..(15): n is a, c, g, or t
  misc_feature (18)..(18): n is a, c, g, or t
  misc_feature (21)..(21): n is a, c, g, or t
  misc_feature (24)..(24): n is a, c, g, or t
  misc_feature (27)..(27): n is a, c, g, or t
  misc_feature (33)..(33): n is a, c, g, or t
  misc_feature (36)..(36): n is a, c, g, or t
  misc_feature (39)..(39): n is a, c, g, or t
  misc_feature (45)..(45): n is a, c, g, or t
  misc_feature (51)..(51): n is a, c, g, or t
  misc_feature (54)..(54): n is a, c, g, or t
  misc_feature (69)..(69): n is a, c, g, or t
  misc_feature (75)..(75): n is a, c, g, or t
  misc_feature (78)..(78): n is a, c, g, or t
  misc_feature (81)..(81): n is a, c, g, or t
  misc_feature (87)..(87): n is a, c, g, or t
  misc_feature (90)..(90): n is a, c, g, or t
  misc_feature (96)..(96): n is a, c, g, or t
  misc_feature (99)..(99): n is a, c, g, or t
  misc_feature (108)..(108): n is a, c, g, or t
  misc_feature (111)..(111): n is a, c, g, or t
  misc_feature (114)..(114): n is a, c, g, or t
  misc_feature (120)..(120): n is a, c, g, or t
  misc_feature (126)..(126): n is a, c, g, or t
  misc_feature (129)..(129): n is a, c, g, or t
  misc_feature (138)..(138): n is a, c, g, or t
  misc_feature (156)..(156): n is a, c, g, or t
  misc_feature (159)..(159): n is a, c, g, or t
  misc_feature (162)..(162): n is a, c, g, or t
  misc_feature (165)..(165): n is a, c, g, or t
  misc_feature (174)..(174): n is a, c, g, or t
  misc_feature (177)..(177): n is a, c, g, or t
  misc_feature (183)..(183): n is a, c, g, or t
  misc_feature (198)..(198): n is a, c, g, or t
  misc_feature (213)..(213): n is a, c, g, or t
  misc_feature (216)..(216): n is a, c, g, or t
  misc_feature (225)..(225): n is a, c, g, or t
  misc_feature (228)..(228): n is a, c, g, or t
  misc_feature (240)..(240): n is a, c, g, or t
  misc_feature (246)..(246): n is a, c, g, or t
  misc_feature (249)..(249): n is a, c, g, or t
  misc_feature (252)..(252): n is a, c, g, or t
  misc_feature (255)..(255): n is a, c, g, or t
  misc_feature (267)..(267): n is a, c, g, or t
  misc_feature (273)..(273): n is a, c, g, or t
  misc_feature (276)..(276): n is a, c, g, or t
  misc_feature (285)..(285): n is a, c, g, or t
  misc_feature (291)..(291): n is a, c, g, or t
  misc_feature (297)..(297): n is a, c, g, or t
  misc_feature (303)..(303): n is a, c, g, or t
  misc_feature (306)..(306): n is a, c, g, or t
  misc_feature (312)..(312): n is a, c, g, or t
  misc_feature (327)..(327): n is a, c, g, or t
  misc_feature (330)..(330): n is a, c, g, or t
  misc_feature (336)..(336): n is a, c, g, or t
  misc_feature (345)..(345): n is a, c, g, or t
  misc_feature (348)..(348): n is a, c, g, or t
  misc_feature (351)..(351): n is a, c, g, or t
  misc_feature (354)..(354): n is a, c, g, or t
  misc_feature (357)..(357): n is a, c, g, or t
  misc_feature (360)..(360): n is a, c, g, or t
  misc_feature (363)..(363): n is a, c, g, or t
  misc_feature (369)..(369): n is a, c, g, or t
  misc_feature (378)..(378): n is a, c, g, or t
  misc_feature (381)..(381): n is a, c, g, or t
  misc_feature (390)..(390): n is a, c, g, or t
  misc_feature (393)..(393): n is a, c, g, or t
  misc_feature (396)..(396): n is a, c, g, or t
  misc_feature (399)..(399): n is a, c, g, or t
wsngtngtnathwsnggngcnytnacngayggngcnggnathccnatgwsnggntaycayathathytnaarwsnmgngtnaayacnccngargtngtnatgaayacngtngcngaygtnatgacnggnaaygayggngartaytgyttycaygcnmgnacnggnaartayggngtntayytnaarcargaytggmgnaaygartayaaygtnggngayathgcngtntaygargaywsnaarccnggnacnytnaaygayttyytnathgcnccngaygarggngayytnaarccngaygtngtnaarmgnttygargaratggtngcncargcncarcarwsngcnggngcngcngcnggnaaygcncarcaracngcncargaygtngcngcngcn

SEQ ID NO: 717 - DNA, 399 bp, Artificial Sequence
  PfN-CNA11
  misc_feature (3)..(3): n is a, c, g, or t
  misc_feature (6)..(6): n is a, c, g, or t
  misc_feature (9)..(9): n is a, c, g, or t
  misc_feature (15)..(15): n is a, c, g, or t
  misc_feature (18)..(18): n is a, c, g, or t
  misc_feature (21)..(21): n is a, c, g, or t
  misc_feature (24)..(24): n is a, c, g, or t
  misc_feature (27)..(27): n is a, c, g, or t
  misc_feature (33)..(33): n is a, c, g, or t
  misc_feature (36)..(36): n is a, c, g, or t
  misc_feature (39)..(39): n is a, c, g, or t
  misc_feature (45)..(45): n is a, c, g, or t
  misc_feature (51)..(51): n is a, c, g, or t
  misc_feature (54)..(54): n is a, c, g, or t
  misc_feature (69)..(69): n is a, c, g, or t
  misc_feature (75)..(75): n is a, c, g, or t
  misc_feature (78)..(78): n is a, c, g, or t
  misc_feature (81)..(81): n is a, c, g, or t
  misc_feature (87)..(87): n is a, c, g, or t
  misc_feature (90)..(90): n is a, c, g, or t
  misc_feature (96)..(96): n is a, c, g, or t
  misc_feature (99)..(99): n is a, c, g, or t
  misc_feature (108)..(108): n is a, c, g, or t
  misc_feature (111)..(111): n is a, c, g, or t
  misc_feature (114)..(114): n is a, c, g, or t
  misc_feature (120)..(120): n is a, c, g, or t
  misc_feature (126)..(126): n is a, c, g, or t
  misc_feature (129)..(129): n is a, c, g, or t
  misc_feature (138)..(138): n is a, c, g, or t
  misc_feature (156)..(156): n is a, c, g, or t
  misc_feature (159)..(159): n is a, c, g, or t
  misc_feature (162)..(162): n is a, c, g, or t
  misc_feature (165)..(165): n is a, c, g, or t
  misc_feature (174)..(174): n is a, c, g, or t
  misc_feature (177)..(177): n is a, c, g, or t
  misc_feature (183)..(183): n is a, c, g, or t
  misc_feature (198)..(198): n is a, c, g, or t
  misc_feature (213)..(213): n is a, c, g, or t
  misc_feature (216)..(216): n is a, c, g, or t
  misc_feature (225)..(225): n is a, c, g, or t
  misc_feature (228)..(228): n is a, c, g, or t
  misc_feature (240)..(240): n is a, c, g, or t
  misc_feature (246)..(246): n is a, c, g, or t
  misc_feature (249)..(249): n is a, c, g, or t
  misc_feature (252)..(252): n is a, c, g, or t
  misc_feature (255)..(255): n is a, c, g, or t
  misc_feature (267)..(267): n is a, c, g, or t
  misc_feature (273)..(273): n is a, c, g, or t
  misc_feature (276)..(276): n is a, c, g, or t
  misc_feature (285)..(285): n is a, c, g, or t
  misc_feature (291)..(291): n is a, c, g, or t
  misc_feature (297)..(297): n is a, c, g, or t
  misc_feature (303)..(303): n is a, c, g, or t
  misc_feature (306)..(306): n is a, c, g, or t
  misc_feature (312)..(312): n is a, c, g, or t
  misc_feature (327)..(327): n is a, c, g, or t
  misc_feature (330)..(330): n is a, c, g, or t
  misc_feature (336)..(336): n is a, c, g, or t
  misc_feature (345)..(345): n is a, c, g, or t
  misc_feature (348)..(348): n is a, c, g, or t
  misc_feature (351)..(351): n is a, c, g, or t
  misc_feature (354)..(354): n is a, c, g, or t
  misc_feature (357)..(357): n is a, c, g, or t
  misc_feature (360)..(360): n is a, c, g, or t
  misc_feature (363)..(363): n is a, c, g, or t
  misc_feature (369)..(369): n is a, c, g, or t
  misc_feature (378)..(378): n is a, c, g, or t
  misc_feature (381)..(381): n is a, c, g, or t
  misc_feature (390)..(390): n is a, c, g, or t
  misc_feature (393)..(393): n is a, c, g, or t
  misc_feature (396)..(396): n is a, c, g, or t
  misc_feature (399)..(399): n is a, c, g, or t
wsngtngtnathwsnggngcnytnacngayggngcnggnathccnatgwsnggntaycayathathytnaarwsnmgngtnaayacnccngargtngtnatgaayacngtngcngaygtnatggcnggnaaygayggngartaytgyttycaygcnmgnacnggnaartayggngtntayytnaarcargaytggmgnaaygartayaaygtnggngayathgcngtntaygargaywsnaarccnggnacnytnaaygayttyytnathgcnccngaygarggngayytnaarccngaygtngtnaarmgnttygargaratggtngcncargcncarcarwsngcnggngcngcngcnggnaaygcncarcaracngcncargaygtngcngcngcn

SEQ ID NO: 718 - DNA, 399 bp, Artificial Sequence
  PfN-CNA12
  misc_feature (3)..(3): n is a, c, g, or t
  misc_feature (6)..(6): n is a, c, g, or t
  misc_feature (9)..(9): n is a, c, g, or t
  misc_feature (15)..(15): n is a, c, g, or t
  misc_feature (18)..(18): n is a, c, g, or t
  misc_feature (21)..(21): n is a, c, g, or t
  misc_feature (24)..(24): n is a, c, g, or t
  misc_feature (27)..(27): n is a, c, g, or t
  misc_feature (33)..(33): n is a, c, g, or t
  misc_feature (36)..(36): n is a, c, g, or t
  misc_feature (39)..(39): n is a, c, g, or t
  misc_feature (45)..(45): n is a, c, g, or t
  misc_feature (51)..(51): n is a, c, g, or t
  misc_feature (54)..(54): n is a, c, g, or t
  misc_feature (69)..(69): n is a, c, g, or t
  misc_feature (75)..(75): n is a, c, g, or t
  misc_feature (78)..(78): n is a, c, g, or t
  misc_feature (81)..(81): n is a, c, g, or t
  misc_feature (87)..(87): n is a, c, g, or t
  misc_feature (90)..(90): n is a, c, g, or t
  misc_feature (96)..(96): n is a, c, g, or t
  misc_feature (99)..(99): n is a, c, g, or t
  misc_feature (108)..(108): n is a, c, g, or t
  misc_feature (111)..(111): n is a, c, g, or t
  misc_feature (114)..(114): n is a, c, g, or t
  misc_feature (120)..(120): n is a, c, g, or t
  misc_feature (126)..(126): n is a, c, g, or t
  misc_feature (129)..(129): n is a, c, g, or t
  misc_feature (138)..(138): n is a, c, g, or t
  misc_feature (156)..(156): n is a, c, g, or t
  misc_feature (159)..(159): n is a, c, g, or t
  misc_feature (162)..(162): n is a, c, g, or t
  misc_feature (165)..(165): n is a, c, g, or t
  misc_feature (174)..(174): n is a, c, g, or t
  misc_feature (177)..(177): n is a, c, g, or t
  misc_feature (183)..(183): n is a, c, g, or t
  misc_feature (198)..(198): n is a, c, g, or t
  misc_feature (213)..(213): n is a, c, g, or t
  misc_feature (216)..(216): n is a, c, g, or t
  misc_feature (225)..(225): n is a, c, g, or t
  misc_feature (228)..(228): n is a, c, g, or t
  misc_feature (240)..(240): n is a, c, g, or t
  misc_feature (246)..(246): n is a, c, g, or t
  misc_feature (249)..(249): n is a, c, g, or t
  misc_feature (252)..(252): n is a, c, g, or t
  misc_feature (255)..(255): n is a, c, g, or t
  misc_feature (267)..(267): n is a, c, g, or t
  misc_feature (273)..(273): n is a, c, g, or t
  misc_feature (276)..(276): n is a, c, g, or t
  misc_feature (285)..(285): n is a, c, g, or t
  misc_feature (291)..(291): n is a, c, g, or t
  misc_feature (297)..(297): n is a, c, g, or t
  misc_feature (303)..(303): n is a, c, g, or t
  misc_feature (306)..(306): n is a, c, g, or t
  misc_feature (312)..(312): n is a, c, g, or t
  misc_feature (327)..(327): n is a, c, g, or t
  misc_feature (330)..(330): n is a, c, g, or t
  misc_feature (336)..(336): n is a, c, g, or t
  misc_feature (345)..(345): n is a, c, g, or t
  misc_feature (348)..(348): n is a, c, g, or t
  misc_feature (351)..(351): n is a, c, g, or t
  misc_feature (354)..(354): n is a, c, g, or t
  misc_feature (357)..(357): n is a, c, g, or t
  misc_feature (360)..(360): n is a, c, g, or t
  misc_feature (363)..(363): n is a, c, g, or t
  misc_feature (369)..(369): n is a, c, g, or t
  misc_feature (378)..(378): n is a, c, g, or t
  misc_feature (381)..(381): n is a, c, g, or t
  misc_feature (390)..(390): n is a, c, g, or t
  misc_feature (393)..(393): n is a, c, g, or t
  misc_feature (396)..(396): n is a, c, g, or t
  misc_feature (399)..(399): n is a, c, g, or t
wsngtngtnathwsnggngcnytnacngayggngcnggnathccnatgwsnggntaycayathathytnaarwsnmgngtnaayccnccngargtngtnatgaayacngtngcngaygtnatgacnggnaaygayggngartaytgyttycaygcnmgnacnggnaartayggngtntayytnaarcargaytggmgnaaygartayaaygtnggngayathgcngtntaygargaywsnaarccnggnacnytnaaygayttyytnathgcnccngaygarggngayytnaarccngaygtngtnaarmgnttygargaratggtngcncargcncarcarwsngcnggngcngcngcnggnaaygcncarcaracngcncargaygtngcngcngcn

SEQ ID NO: 719 - DNA, 399 bp, Artificial Sequence
  PfN-CNA13
  misc_feature (3)..(3): n is a, c, g, or t
  misc_feature (6)..(6): n is a, c, g, or t
  misc_feature (9)..(9): n is a, c, g, or t
  misc_feature (15)..(15): n is a, c, g, or t
  misc_feature (18)..(18): n is a, c, g, or t
  misc_feature (21)..(21): n is a, c, g, or t
  misc_feature (24)..(24): n is a, c, g, or t
  misc_feature (27)..(27): n is a, c, g, or t
  misc_feature (33)..(33): n is a, c, g, or t
  misc_feature (36)..(36): n is a, c, g, or t
  misc_feature (39)..(39): n is a, c, g, or t
  misc_feature (45)..(45): n is a, c, g, or t
  misc_feature (51)..(51): n is a, c, g, or t
  misc_feature (54)..(54): n is a, c, g, or t
  misc_feature (69)..(69): n is a, c, g, or t
  misc_feature (75)..(75): n is a, c, g, or t
  misc_feature (78)..(78): n is a, c, g, or t
  misc_feature (81)..(81): n is a, c, g, or t
  misc_feature (84)..(84): n is a, c, g, or t
  misc_feature (87)..(87): n is a, c, g, or t
  misc_feature (90)..(90): n is a, c, g, or t
  misc_feature (96)..(96): n is a, c, g, or t
  misc_feature (99)..(99): n is a, c, g, or t
  misc_feature (108)..(108): n is a, c, g, or t
  misc_feature (111)..(111): n is a, c, g, or t
  misc_feature (114)..(114): n is a, c, g, or t
  misc_feature (120)..(120): n is a, c, g, or t
  misc_feature (126)..(126): n is a, c, g, or t
  misc_feature (129)..(129): n is a, c, g, or t
  misc_feature (138)..(138): n is a, c, g, or t
  misc_feature (156)..(156): n is a, c, g, or t
  misc_feature (159)..(159): n is a, c, g, or t
  misc_feature (162)..(162): n is a, c, g, or t
  misc_feature (165)..(165): n is a, c, g, or t
  misc_feature (174)..(174): n is a, c, g, or t
  misc_feature (177)..(177): n is a, c, g, or t
  misc_feature (183)..(183): n is a, c, g, or t
  misc_feature (198)..(198): n is a, c, g, or t
  misc_feature (213)..(213): n is a, c, g, or t
  misc_feature (216)..(216): n is a, c, g, or t
  misc_feature (225)..(225): n is a, c, g, or t
  misc_feature (228)..(228): n is a, c, g, or t
  misc_feature (240)..(240): n is a, c, g, or t
  misc_feature (246)..(246): n is a, c, g, or t
  misc_feature (249)..(249): n is a, c, g, or t
  misc_feature (252)..(252): n is a, c, g, or t
  misc_feature (255)..(255): n is a, c, g, or t
  misc_feature (267)..(267): n is a, c, g, or t
  misc_feature (273)..(273): n is a, c, g, or t
  misc_feature (276)..(276): n is a, c, g, or t
  misc_feature (285)..(285): n is a, c, g, or t
  misc_feature (291)..(291): n is a, c, g, or t
  misc_feature (297)..(297): n is a, c, g, or t
  misc_feature (303)..(303): n is a, c, g, or t
  misc_feature (306)..(306): n is a, c, g, or t
  misc_feature (312)..(312): n is a, c, g, or t
  misc_feature (327)..(327): n is a, c, g, or t
  misc_feature (330)..(330): n is a, c, g, or t
  misc_feature (336)..(336): n is a, c, g, or t
  misc_feature (345)..(345): n is a, c, g, or t
  misc_feature (348)..(348): n is a, c, g, or t
  misc_feature (351)..(351): n is a, c, g, or t
  misc_feature (354)..(354): n is a, c, g, or t
  misc_feature (357)..(357): n is a, c, g, or t
  misc_feature (360)..(360): n is a, c, g, or t
  misc_feature (363)..(363): n is a, c, g, or t
  misc_feature (369)..(369): n is a, c, g, or t
  misc_feature (372)..(372): n is a, c, g, or t
  misc_feature (378)..(378): n is a, c, g, or t
  misc_feature (381)..(381): n is a, c, g, or t
  misc_feature (390)..(390): n is a, c, g, or t
  misc_feature (393)..(393): n is a, c, g, or t
  misc_feature (396)..(396): n is a, c, g, or t
  misc_feature (399)..(399): n is a, c, g, or t
wsngtngtnathwsnggngcnytnacngayggngcnggnathccnatgwsnggntaycayathathytnaarwsnmgngtnacnccnccngargtngtnatgcayacngtngcngaygtnatgacnggnaaygayggngartaytgyttycaygcnmgnacnggnaartayggngtntayytnaarcargaytggmgnaaygartayaaygtnggngayathgcngtntaygargaywsnaarccnggnacnytnaaygayttyytnathgcnccngaygarggngayytnaarccngaygtngtnaarmgnttygargaratggtngcncargcncarcarwsngcnggngcngcngcnggnaaygcnmgncaracngcncargaygtngcngcngcn

SEQ ID NO: 720 - DNA, 399 bp, Artificial Sequence
  PfN-CNA14
  misc_feature (3)..(3): n is a, c, g, or t
  misc_feature (6)..(6): n is a, c, g, or t
  misc_feature (15)..(15): n is a, c, g, or t
  misc_feature (18)..(18): n is a, c, g, or t
  misc_feature (21)..(21): n is a, c, g, or t
  misc_feature (24)..(24): n is a, c, g, or t
  misc_feature (33)..(33): n is a, c, g, or t
  misc_feature (36)..(36): n is a, c, g, or t
  misc_feature (39)..(39): n is a, c, g, or t
  misc_feature (45)..(45): n is a, c, g, or t
  misc_feature (51)..(51): n is a, c, g, or t
  misc_feature (54)..(54): n is a, c, g, or t
  misc_feature (69)..(69): n is a, c, g, or t
  misc_feature (75)..(75): n is a, c, g, or t
  misc_feature (78)..(78): n is a, c, g, or t
  misc_feature (81)..(81): n is a, c, g, or t
  misc_feature (87)..(87): n is a, c, g, or t
  misc_feature (90)..(90): n is a, c, g, or t
  misc_feature (96)..(96): n is a, c, g, or t
  misc_feature (99)..(99): n is a, c, g, or t
  misc_feature (105)..(105): n is a, c, g, or t
  misc_feature (108)..(108): n is a, c, g, or t
  misc_feature (114)..(114): n is a, c, g, or t
  misc_feature (117)..(117): n is a, c, g, or t
  misc_feature (123)..(123): n is a, c, g, or t
  misc_feature (126)..(126): n is a, c, g, or t
  misc_feature (129)..(129): n is a, c, g, or t
  misc_feature (132)..(132): n is a, c, g, or t
  misc_feature (138)..(138): n is a, c, g, or t
  misc_feature (147)..(147): n is a, c, g, or t
  misc_feature (156)..(156): n is a, c, g, or t
  misc_feature (162)..(162): n is a, c, g, or t
  misc_feature (165)..(165): n is a, c, g, or t
  misc_feature (168)..(168): n is a, c, g, or t
  misc_feature (177)..(177): n is a, c, g, or t
  misc_feature (183)..(183): n is a, c, g, or t
  misc_feature (186)..(186): n is a, c, g, or t
  misc_feature (192)..(192): n is a, c, g, or t
  misc_feature (198)..(198): n is a, c, g, or t
  misc_feature (213)..(213): n is a, c, g, or t
  misc_feature (216)..(216): n is a, c, g, or t
  misc_feature (225)..(225): n is a, c, g, or t
  misc_feature (228)..(228): n is a, c, g, or t
  misc_feature (240)..(240): n is a, c, g, or t
  misc_feature (246)..(246): n is a, c, g, or t
  misc_feature (249)..(249): n is a, c, g, or t
  misc_feature (252)..(252): n is a, c, g, or t
  misc_feature (255)..(255): n is a, c, g, or t
  misc_feature (267)..(267): n is a, c, g, or t
  misc_feature (273)..(273): n is a, c, g, or t
  misc_feature (276)..(276): n is a, c, g, or t
  misc_feature (285)..(285): n is a, c, g, or t
  misc_feature (291)..(291): n is a, c, g, or t
  misc_feature (297)..(297): n is a, c, g, or t
  misc_feature (303)..(303): n is a, c, g, or t
  misc_feature (306)..(306): n is a, c, g, or t
  misc_feature (312)..(312): n is a, c, g, or t
  misc_feature (324)..(324): n is a, c, g, or t
  misc_feature (327)..(327): n is a, c, g, or t
  misc_feature (330)..(330): n is a, c, g, or t
  misc_feature (336)..(336): n is a, c, g, or t
  misc_feature (345)..(345): n is a, c, g, or t
  misc_feature (348)..(348): n is a, c, g, or t
  misc_feature (357)..(357): n is a, c, g, or t
  misc_feature (360)..(360): n is a, c, g, or t
  misc_feature (366)..(366): n is a, c, g, or t
  misc_feature (369)..(369): n is a, c, g, or t
  misc_feature (378)..(378): n is a, c, g, or t
  misc_feature (381)..(381): n is a, c, g, or t
  misc_feature (387)..(387): n is a, c, g, or t
  misc_feature (390)..(390): n is a, c, g, or t
  misc_feature (399)..(399): n is a, c, g, or t
wsngtnaarathwsnggngcnytnathgayggngcnggnathccnatgwsnggntgycarathathytnaargcnmgngtnaayacngcngargtngtnatgmgnacnathgcnacnathacnacnggnmgnaayggngartaywsnttygargcncargtnggnmgntaytgygtntayytnmgncayggntggwsnaaygartaytgygtnggngayathacngtntaygaygaywsnaarccnggnacnytnaaygayttyytnathgcnytngaygarggngayytnaarccngaygtngtnaarmgnttygargarytngtngcncargcncarcarwsngcngayatggcngcngarwsngcncarcargtnwsncarwsngtncargaygtn

SEQ ID NO: 721 - DNA, 402 bp, Artificial Sequence
  PfN-CNA15
  misc_feature (3)..(3): n is a, c, g, or t
  misc_feature (6)..(6): n is a, c, g, or t
  misc_feature (9)..(9): n is a, c, g, or t
  misc_feature (15)..(15): n is a, c, g, or t
  misc_feature (18)..(18): n is a, c, g, or t
  misc_feature (21)..(21): n is a, c, g, or t
  misc_feature (24)..(24): n is a, c, g, or t
  misc_feature (33)..(33): n is a, c, g, or t
  misc_feature (36)..(36): n is a, c, g, or t
  misc_feature (39)..(39): n is a, c, g, or t
  misc_feature (45)..(45): n is a, c, g, or t
  misc_feature (48)..(48): n is a, c, g, or t
  misc_feature (51)..(51): n is a, c, g, or t
  misc_feature (54)..(54): n is a, c, g, or t
  misc_feature (60)..(60): n is a, c, g, or t
  misc_feature (69)..(69): n is a, c, g, or t
  misc_feature (75)..(75): n is a, c, g, or t
  misc_feature (78)..(78): n is a, c, g, or t
  misc_feature (81)..(81): n is a, c, g, or t
  misc_feature (84)..(84): n is a, c, g, or t
  misc_feature (87)..(87): n is a, c, g, or t
  misc_feature (93)..(93): n is a, c, g, or t
  misc_feature (96)..(96): n is a, c, g, or t
  misc_feature (102)..(102): n is a, c, g, or t
  misc_feature (105)..(105): n is a, c, g, or t
  misc_feature (108)..(108): n is a, c, g, or t
  misc_feature (111)..(111): n is a, c, g, or t
  misc_feature (114)..(114): n is a, c, g, or t
  misc_feature (120)..(120): n is a, c, g, or t
  misc_feature (126)..(126): n is a, c, g, or t
  misc_feature (135)..(135): n is a, c, g, or t
  misc_feature (138)..(138): n is a, c, g, or t
  misc_feature (141)..(141): n is a, c, g, or t
  misc_feature (147)..(147): n is a, c, g, or t
  misc_feature (156)..(156): n is a, c, g, or t
  misc_feature (162)..(162): n is a, c, g, or t
  misc_feature (165)..(165): n is a, c, g, or t
  misc_feature (174)..(174): n is a, c, g, or t
  misc_feature (177)..(177): n is a, c, g, or t
  misc_feature (180)..(180): n is a, c, g, or t
  misc_feature (183)..(183): n is a, c, g, or t
  misc_feature (189)..(189): n is a, c, g, or t
  misc_feature (195)..(195): n is a, c, g, or t
  misc_feature (201)..(201): n is a, c, g, or t
  misc_feature (204)..(204): n is a, c, g, or t
  misc_feature (207)..(207): n is a, c, g, or t
  misc_feature (213)..(213): n is a, c, g, or t
  misc_feature (216)..(216): n is a, c, g, or t
  misc_feature (225)..(225): n is a, c, g, or t
  misc_feature (228)..(228): n is a, c, g, or t
  misc_feature (234)..(234): n is a, c, g, or t
  misc_feature (240)..(240): n is a, c, g, or t
  misc_feature (246)..(246): n is a, c, g, or t
  misc_feature (249)..(249): n is a, c, g, or t
  misc_feature (252)..(252): n is a, c, g, or t
  misc_feature (255)..(255): n is a, c, g, or t
  misc_feature (267)..(267): n is a, c, g, or t
  misc_feature (285)..(285): n is a, c, g, or t
  misc_feature (297)..(297): n is a, c, g, or t
  misc_feature (303)..(303): n is a, c, g, or t
  misc_feature (306)..(306): n is a, c, g, or t
  misc_feature (309)..(309): n is a, c, g, or t
  misc_feature (315)..(315): n is a, c, g, or t
  misc_feature (321)..(321): n is a, c, g, or t
  misc_feature (324)..(324): n is a, c, g, or t
  misc_feature (327)..(327): n is a, c, g, or t
  misc_feature (330)..(330): n is a, c, g, or t
  misc_feature (339)..(339): n is a, c, g, or t
  misc_feature (345)..(345): n is a, c, g, or t
  misc_feature (348)..(348): n is a, c, g, or t
  misc_feature (354)..(354): n is a, c, g, or t
  misc_feature (357)..(357): n is a, c, g, or t
  misc_feature (360)..(360): n is a, c, g, or t
  misc_feature (363)..(363): n is a, c, g, or t
  misc_feature (366)..(366): n is a, c, g, or t
  misc_feature (369)..(369): n is a, c, g, or t
  misc_feature (378)..(378): n is a, c, g, or t
  misc_feature (387)..(387): n is a, c, g, or t
  misc_feature (390)..(390): n is a, c, g, or t
  misc_feature (399)..(399): n is a, c, g, or t
  misc_feature (402)..(402): n is a, c, g, or t
acngtnmgnathwsnggngtnytnaargayggnacnggnaarccngtnccnggntgyacnathgarytnaargcnmgnmgnacnacngaracngtnathgtnacnacngtngcncarggncarccngargaracnggnwsntaywsnttygaygtngarccnggntggtaymgngtnacnytnaayacngarggntaygcnccnwsntaygtnggngayathytngtnaargcngaywsngarccnggnacnytnaayaarttyytnatggarcargaygargcncartaytayccnaargcnytngcngarytngargcngtngcngcngarathytnaarmgngcngargcnwsngcngcnwsngcngargargcnaaraarmgngcngaraaygcnmgn

SEQ ID NO: 722 - DNA, 402 bp, Artificial Sequence
  PfN-CNA16
  misc_feature (3)..(3): n is a, c, g, or t
  misc_feature (6)..(6): n is a, c, g, or t
  misc_feature (9)..(9): n is a, c, g, or t
  misc_feature (15)..(15): n is a, c, g, or t
  misc_feature (18)..(18): n is a, c, g, or t
  misc_feature (21)..(21): n is a, c, g, or t
  misc_feature (24)..(24): n is a, c, g, or t
  misc_feature (33)..(33): n is a, c, g, or t
  misc_feature (36)..(36): n is a, c, g, or t
  misc_feature (39)..(39): n is a, c, g, or t
  misc_feature (45)..(45): n is a, c, g, or t
  misc_feature (48)..(48): n is a, c, g, or t
  misc_feature (51)..(51): n is a, c, g, or t
  misc_feature (54)..(54): n is a, c, g, or t
  misc_feature (60)..(60): n is a, c, g, or t
  misc_feature (69)..(69): n is a, c, g, or t
  misc_feature (75)..(75): n is a, c, g, or t
  misc_feature (78)..(78): n is a, c, g, or t
  misc_feature (81)..(81): n is a, c, g, or t
  misc_feature (84)..(84): n is a, c, g, or t
  misc_feature (87)..(87): n is a, c, g, or t
  misc_feature (93)..(93): n is a, c, g, or t
  misc_feature (96)..(96): n is a, c, g, or t
  misc_feature (102)..(102): n is a, c, g, or t
  misc_feature (105)..(105): n is a, c, g, or t
  misc_feature (108)..(108): n is a, c, g, or t
  misc_feature (111)..(111): n is a, c, g, or t
  misc_feature (114)..(114): n is a, c, g, or t
  misc_feature (120)..(120): n is a, c, g, or t
  misc_feature (126)..(126): n is a, c, g, or t
  misc_feature (129)..(129): n is a, c, g, or t
  misc_feature (135)..(135): n is a, c, g, or t
  misc_feature (138)..(138): n is a, c, g, or t
  misc_feature (141)..(141): n is a, c, g, or t
  misc_feature (147)..(147): n is a, c, g, or t
  misc_feature (156)..(156): n is a, c, g, or t
  misc_feature (162)..(162): n is a, c, g, or t
  misc_feature (165)..(165): n is a, c, g, or t
  misc_feature (174)..(174): n is a, c, g, or t
  misc_feature (177)..(177): n is a, c, g, or t
  misc_feature (180)..(180): n is a, c, g, or t
  misc_feature (183)..(183): n is a, c, g, or t
  misc_feature (189)..(189): n is a, c, g, or t
  misc_feature (195)..(195): n is a, c, g, or t
  misc_feature (201)..(201): n is a, c, g, or t
  misc_feature (204)..(204): n is a, c, g, or t
  misc_feature (207)..(207): n is a, c, g, or t
  misc_feature (213)..(213): n is a, c, g, or t
  misc_feature (216)..(216): n is a, c, g, or t
  misc_feature (225)..(225): n is a, c, g, or t
  misc_feature (228)..(228): n is a, c, g, or t
  misc_feature (234)..(234): n is a, c, g, or t
  misc_feature (240)..(240): n is a, c, g, or t
  misc_feature (246)..(246): n is a, c, g, or t
  misc_feature (249)..(249): n is a, c, g, or t
  misc_feature (252)..(252): n is a, c, g, or t
  misc_feature (255)..(255): n is a, c, g, or t
  misc_feature (267)..(267): n is a, c, g, or t
  misc_feature (285)..(285): n is a, c, g, or t
  misc_feature (297)..(297): n is a, c, g, or t
  misc_feature (303)..(303): n is a, c, g, or t
  misc_feature (306)..(306): n is a, c, g, or t
  misc_feature (309)..(309): n is a, c, g, or t
  misc_feature (315)..(315): n is a, c, g, or t
  misc_feature (321)..(321): n is a, c, g, or t
  misc_feature (324)..(324): n is a, c, g, or t
  misc_feature (327)..(327): n is a, c, g, or t
  misc_feature (330)..(330): n is a, c, g, or t
  misc_feature (339)..(339): n is a, c, g, or t
  misc_feature (345)..(345): n is a, c, g, or t
  misc_feature (348)..(348): n is a, c, g, or t
  misc_feature (354)..(354): n is a, c, g, or t
  misc_feature (357)..(357): n is a, c, g, or t
  misc_feature (360)..(360): n is a, c, g, or t
  misc_feature (363)..(363): n is a, c, g, or t
  misc_feature (366)..(366): n is a, c, g, or t
  misc_feature (369)..(369): n is a, c, g, or t
  misc_feature (378)..(378): n is a, c, g, or t
  misc_feature (387)..(387): n is a, c, g, or t
  misc_feature (390)..(390): n is a, c, g, or t
  misc_feature (399)..(399): n is a, c, g, or t
  misc_feature (402)..(402): n is a, c, g, or t
acngtnmgnathwsnggngtnytnaargayggnacnggnaarccngtnccnggntgyacnathgarytnaargcnmgnmgnacnacngaracngtnathgtnacnacngtngcncarggncarccnggngaracnggnwsntaywsnttygaygtngarccnggntggtaymgngtnacnytnaayacngarggntaygcnccnwsntaygtnggngayathytngtnaargcngaywsngarccnggnacnytnaayaarttyytnatggarcargaygargcncartaytayccnaargcnytngcngarytngargcngtngcngcngarathytnaarmgngcngargcnwsngcngcnwsngcngargargcnaaraarmgngcngaraaygcnmgn

SEQ ID NO: 723 - DNA, 399 bp, Artificial Sequence
  PfN-CNA17
  misc_feature (3)..(3): n is a, c, g, or t
  misc_feature (6)..(6): n is a, c, g, or t
  misc_feature (15)..(15): n is a, c, g, or t
  misc_feature (18)..(18): n is a, c, g, or t
  misc_feature (21)..(21): n is a, c, g, or t
  misc_feature (24)..(24): n is a, c, g, or t
  misc_feature (33)..(33): n is a, c, g, or t
  misc_feature (36)..(36): n is a, c, g, or t
  misc_feature (39)..(39): n is a, c, g, or t
  misc_feature (45)..(45): n is a, c, g, or t
  misc_feature (48)..(48): n is a, c, g, or t
  misc_feature (60)..(60): n is a, c, g, or t
  misc_feature (69)..(69): n is a, c, g, or t
  misc_feature (75)..(75): n is a, c, g, or t
  misc_feature (78)..(78): n is a, c, g, or t
  misc_feature (81)..(81): n is a, c, g, or t
  misc_feature (87)..(87): n is a, c, g, or t
  misc_feature (90)..(90): n is a, c, g, or t
  misc_feature (93)..(93): n is a, c, g, or t
  misc_feature (96)..(96): n is a, c, g, or t
  misc_feature (99)..(99): n is a, c, g, or t
  misc_feature (102)..(102): n is a, c, g, or t
  misc_feature (108)..(108): n is a, c, g, or t
  misc_feature (111)..(111): n is a, c, g, or t
  misc_feature (114)..(114): n is a, c, g, or t
  misc_feature (117)..(117): n is a, c, g, or t
  misc_feature (126)..(126): n is a, c, g, or t
  misc_feature (135)..(135): n is a, c, g, or t
  misc_feature (138)..(138): n is a, c, g, or t
  misc_feature (141)..(141): n is a, c, g, or t
  misc_feature (147)..(147): n is a, c, g, or t
  misc_feature (156)..(156): n is a, c, g, or t
  misc_feature (165)..(165): n is a, c, g, or t
  misc_feature (174)..(174): n is a, c, g, or t
  misc_feature (177)..(177): n is a, c, g, or t
  misc_feature (180)..(180): n is a, c, g, or t
  misc_feature (183)..(183): n is a, c, g, or t
  misc_feature (186)..(186): n is a, c, g, or t
  misc_feature (189)..(189): n is a, c, g, or t
  misc_feature (195)..(195): n is a, c, g, or t
  misc_feature (201)..(201): n is a, c, g, or t
  misc_feature (204)..(204): n is a, c, g, or t
  misc_feature (207)..(207): n is a, c, g, or t
  misc_feature (213)..(213): n is a, c, g, or t
  misc_feature (216)..(216): n is a, c, g, or t
  misc_feature (225)..(225): n is a, c, g, or t
  misc_feature (228)..(228): n is a, c, g, or t
  misc_feature (240)..(240): n is a, c, g, or t
  misc_feature (246)..(246): n is a, c, g, or t
  misc_feature (249)..(249): n is a, c, g, or t
  misc_feature (252)..(252): n is a, c, g, or t
  misc_feature (255)..(255): n is a, c, g, or t
  misc_feature (267)..(267): n is a, c, g, or t
  misc_feature (270)..(270): n is a, c, g, or t
  misc_feature (273)..(273): n is a, c, g, or t
  misc_feature (279)..(279): n is a, c, g, or t
  misc_feature (291)..(291): n is a, c, g, or t
  misc_feature (294)..(294): n is a, c, g, or t
  misc_feature (297)..(297): n is a, c, g, or t
  misc_feature (303)..(303): n is a, c, g, or t
  misc_feature (306)..(306): n is a, c, g, or t
  misc_feature (309)..(309): n is a, c, g, or t
  misc_feature (312)..(312): n is a, c, g, or t
  misc_feature (321)..(321): n is a, c, g, or t
  misc_feature (327)..(327): n is a, c, g, or t
  misc_feature (336)..(336): n is a, c, g, or t
  misc_feature (339)..(339): n is a, c, g, or t
  misc_feature (342)..(342): n is a, c, g, or t
  misc_feature (348)..(348): n is a, c, g, or t
  misc_feature (357)..(357): n is a, c, g, or t
  misc_feature (369)..(369): n is a, c, g, or t
  misc_feature (372)..(372): n is a, c, g, or t
  misc_feature (378)..(378): n is a, c, g, or t
  misc_feature (384)..(384): n is a, c, g, or t
  misc_feature (387)..(387): n is a, c, g, or t
  misc_feature (390)..(390): n is a, c, g, or t
  misc_feature (393)..(393): n is a, c, g, or t
  misc_feature (399)..(399): n is a, c, g, or t
gcngtnaarathwsnggngtnytnaargayggnacnggnaarccngtncaraaytgyacnathcarytnaargcnmgnmgnaaywsnacnacngtngtngtnaayacngtngcnwsngaraayccngaygargcnggnmgntaywsnatggaygtngartayggncartaywsngtnwsnytnytngtngarggnttyccnccnwsncaygcnggnathathacngtntaygargaywsnaarccnggnacnytnaaygayttyytnggngcnatgacngargaygaygtnmgnccngargcnytnmgnccnttygarytnatggtngargargtngcnmgncaygcngargargcnaaraaraaygcnggngargcngaracnwsngcnmgnaaygcn

SEQ ID NO: 724 - DNA, 399 bp, Artificial Sequence
  PfN-CNA18
  misc_feature (3)..(3): n is a, c, g, or t
  misc_feature (6)..(6): n is a, c, g, or t
  misc_feature (15)..(15): n is a, c, g, or t
  misc_feature (18)..(18): n is a, c, g, or t
  misc_feature (21)..(21): n is a, c, g, or t
  misc_feature (24)..(24): n is a, c, g, or t
  misc_feature (33)..(33): n is a, c, g, or t
  misc_feature (36)..(36): n is a, c, g, or t
  misc_feature (39)..(39): n is a, c, g, or t
  misc_feature (45)..(45): n is a, c, g, or t
  misc_feature (48)..(48): n is a, c, g, or t
  misc_feature (60)..(60): n is a, c, g, or t
  misc_feature (69)..(69): n is a, c, g, or t
  misc_feature (75)..(75): n is a, c, g, or t
  misc_feature (78)..(78): n is a, c, g, or t
  misc_feature (81)..(81): n is a, c, g, or t
  misc_feature (87)..(87): n is a, c, g, or t
  misc_feature (90)..(90): n is a, c, g, or t
  misc_feature (93)..(93): n is a, c, g, or t
  misc_feature (96)..(96): n is a, c, g, or t
  misc_feature (99)..(99): n is a, c, g, or t
  misc_feature (102)..(102): n is a, c, g, or t
  misc_feature (108)..(108): n is a, c, g, or t
  misc_feature (111)..(111): n is a, c, g, or t
  misc_feature (114)..(114): n is a, c, g, or t
  misc_feature (117)..(117): n is a, c, g, or t
  misc_feature (126)..(126): n is a, c, g, or t
  misc_feature (135)..(135): n is a, c, g, or t
  misc_feature (138)..(138): n is a, c, g, or t
  misc_feature (141)..(141): n is a, c, g, or t
  misc_feature (147)..(147): n is a, c, g, or t
  misc_feature (156)..(156): n is a, c, g, or t
  misc_feature (165)..(165): n is a, c, g, or t
  misc_feature (174)..(174): n is a, c, g, or t
  misc_feature (177)..(177): n is a, c, g, or t
  misc_feature (180)..(180): n is a, c, g, or t
  misc_feature (183)..(183): n is a, c, g, or t
  misc_feature (186)..(186): n is a, c, g, or t
  misc_feature (189)..(189): n is a, c, g, or t
  misc_feature (195)..(195): n is a, c, g, or t
  misc_feature (201)..(201): n is a, c, g, or t
  misc_feature (204)..(204): n is a, c, g, or t
  misc_feature (207)..(207): n is a, c, g, or t
  misc_feature (213)..(213): n is a, c, g, or t
  misc_feature (216)..(216): n is a, c, g, or t
  misc_feature (225)..(225): n is a, c, g, or t
  misc_feature (228)..(228): n is a, c, g, or t
  misc_feature (240)..(240): n is a, c, g, or t
  misc_feature (246)..(246): n is a, c, g, or t
  misc_feature (249)..(249): n is a, c, g, or t
  misc_feature (252)..(252): n is a, c, g, or t
  misc_feature (255)..(255): n is a, c, g, or t
  misc_feature (267)..(267): n is a, c, g, or t
  misc_feature (270)..(270): n is a, c, g, or t
  misc_feature (273)..(273): n is a, c, g, or t
  misc_feature (279)..(279): n is a, c, g, or t
  misc_feature (291)..(291): n is a, c, g, or t
  misc_feature (294)..(294): n is a, c, g, or t
  misc_feature (297)..(297): n is a, c, g, or t
  misc_feature (303)..(303): n is a, c, g, or t
  misc_feature (306)..(306): n is a, c, g, or t
  misc_feature (309)..(309): n is a, c, g, or t
  misc_feature (312)..(312): n is a, c, g, or t
  misc_feature (321)..(321): n is a, c, g, or t
  misc_feature (327)..(327): n is a, c, g, or t
  misc_feature (336)..(336): n is a, c, g, or t
  misc_feature (339)..(339): n is a, c, g, or t
  misc_feature (342)..(342): n is a, c, g, or t
  misc_feature (348)..(348): n is a, c, g, or t
  misc_feature (357)..(357): n is a, c, g, or t
  misc_feature (369)..(369): n is a, c, g, or t
  misc_feature (372)..(372): n is a, c, g, or t
  misc_feature (378)..(378): n is a, c, g, or t
  misc_feature (384)..(384): n is a, c, g, or t
  misc_feature (387)..(387): n is a, c, g, or t
  misc_feature (390)..(390): n is a, c, g, or t
  misc_feature (393)..(393): n is a, c, g, or t
  misc_feature (399)..(399): n is a, c, g, or t
gcngtnaarathwsnggngtnytnaargayggnacnggnaarccngtncaraaytgyacnathcarytnaargcnmgnmgnaaywsnacnacngtngtngtnaayacngtngcnwsngaraayccngaygargcnggnmgntaywsnatggaygtngartayggncartaywsngtnwsnytnytngtngarggnttyccnccnwsncaygcnggnathathacngtntaygargaywsnaarccnggnacnytnaaygayttyytnggngcnatgacngargaygaygtnmgnccngargcnytnmgnmgnttygarytnatggtngargargtngcnmgncaygcngargargcnaaraaraaygcnggngargcngaracnwsngcnmgnaaygcn

SEQ ID NO: 725 - DNA, 399 bp, Artificial Sequence
  PfN-CNA19
  misc_feature (3)..(3): n is a, c, g, or t
  misc_feature (6)..(6): n is a, c, g, or t
  misc_feature (15)..(15): n is a, c, g, or t
  misc_feature (18)..(18): n is a, c, g, or t
  misc_feature (21)..(21): n is a, c, g, or t
  misc_feature (24)..(24): n is a, c, g, or t
  misc_feature (33)..(33): n is a, c, g, or t
  misc_feature (36)..(36): n is a, c, g, or t
  misc_feature (39)..(39): n is a, c, g, or t
  misc_feature (45)..(45): n is a, c, g, or t
  misc_feature (48)..(48): n is a, c, g, or t
  misc_feature (60)..(60): n is a, c, g, or t
  misc_feature (69)..(69): n is a, c, g, or t
  misc_feature (75)..(75): n is a, c, g, or t
  misc_feature (81)..(81): n is a, c, g, or t
  misc_feature (87)..(87): n is a, c, g, or t
  misc_feature (90)..(90): n is a, c, g, or t
  misc_feature (93)..(93): n is a, c, g, or t
  misc_feature (96)..(96): n is a, c, g, or t
  misc_feature (99)..(99): n is a, c, g, or t
  misc_feature (102)..(102): n is a, c, g, or t
  misc_feature (108)..(108): n is a, c, g, or t
  misc_feature (111)..(111): n is a, c, g, or t
  misc_feature (114)..(114): n is a, c, g, or t
  misc_feature (117)..(117): n is a, c, g, or t
  misc_feature (126)..(126): n is a, c, g, or t
  misc_feature (135)..(135): n is a, c, g, or t
  misc_feature (138)..(138): n is a, c, g, or t
  misc_feature (141)..(141): n is a, c, g, or t
  misc_feature (147)..(147): n is a, c, g, or t
  misc_feature (156)..(156): n is a, c, g, or t
  misc_feature (165)..(165): n is a, c, g, or t
  misc_feature (174)..(174): n is a, c, g, or t
  misc_feature (177)..(177): n is a, c, g, or t
  misc_feature (183)..(183): n is a, c, g, or t
  misc_feature (186)..(186): n is a, c, g, or t
  misc_feature (189)..(189): n is a, c, g, or t
  misc_feature (195)..(195): n is a, c, g, or t
  misc_feature (201)..(201): n is a, c, g, or t
  misc_feature (204)..(204): n is a, c, g, or t
  misc_feature (207)..(207): n is a, c, g, or t
  misc_feature (213)..(213): n is a, c, g, or t
  misc_feature (216)..(216): n is a, c, g, or t
  misc_feature (219)..(219): n is a, c, g, or t
  misc_feature (225)..(225): n is a, c, g, or t
  misc_feature (228)..(228): n is a, c, g, or t
  misc_feature (240)..(240): n is a, c, g, or t
  misc_feature (246)..(246): n is a, c, g, or t
  misc_feature (249)..(249): n is a, c, g, or t
  misc_feature (252)..(252): n is a, c, g, or t
  misc_feature (255)..(255): n is a, c, g, or t
  misc_feature (267)..(267): n is a, c, g, or t
  misc_feature (270)..(270): n is a, c, g, or t
  misc_feature (273)..(273): n is a, c, g, or t
  misc_feature (279)..(279): n is a, c, g, or t
  misc_feature (291)..(291): n is a, c, g, or t
  misc_feature (294)..(294): n is a, c, g, or t
  misc_feature (297)..(297): n is a, c, g, or t
  misc_feature (303)..(303): n is a, c, g, or t
  misc_feature (306)..(306): n is a, c, g, or t
  misc_feature (309)..(309): n is a, c, g, or t
  misc_feature (312)..(312): n is a, c, g, or t
  misc_feature (321)..(321): n is a, c, g, or t
  misc_feature (327)..(327): n is a, c, g, or t
  misc_feature (336)..(336): n is a, c, g, or t
  misc_feature (339)..(339): n is a, c, g, or t
  misc_feature (342)..(342): n is a, c, g, or t
  misc_feature (348)..(348): n is a, c, g, or t
  misc_feature (357)..(357): n is a, c, g, or t
  misc_feature (369)..(369): n is a, c, g, or t
  misc_feature (372)..(372): n is a, c, g, or t
  misc_feature (378)..(378): n is a, c, g, or t
  misc_feature (384)..(384): n is a, c, g, or t
  misc_feature (387)..(387): n is a, c, g, or t
  misc_feature (390)..(390): n is a, c, g, or t
  misc_feature (393)..(393): n is a, c, g, or t
  misc_feature (399)..(399): n is a, c, g, or t
acngtnaarathwsnggngtnytnaargayggnacnggnaarccngtncaraaytgyacnathcarytnaargcnaarmgnaaywsnacnacngtngtngtnaayacnytngcnwsngaraayccngaygargcnggnmgntaywsnatggaygtngartayggncartaywsngtnathytnytngtngarggnttyccnccnwsncaygcnggnacnathacngtntaygargaywsncarccnggnacnytnaaygayttyytnggngcnatgacngargaygaygcnmgnccngargcnytnmgnmgnttygarytnatggtngargargtngtnmgnaaygcngargargcnaaraaraaygcnggngargcngaracnwsngcnmgnaaygcn

SEQ ID NO: 726 - DNA, 399 bp, Artificial Sequence
  PfN-CNA20
  misc_feature (3)..(3): n is a, c, g, or t
  misc_feature (6)..(6): n is a, c, g, or t
  misc_feature (15)..(15): n is a, c, g, or t
  misc_feature (18)..(18): n is a, c, g, or t
  misc_feature (21)..(21): n is a, c, g, or t
  misc_feature (24)..(24): n is a, c, g, or t
  misc_feature (33)..(33): n is a, c, g, or t
  misc_feature (36)..(36): n is a, c, g, or t
  misc_feature (39)..(39): n is a, c, g, or t
  misc_feature (45)..(45): n is a, c, g, or t
  misc_feature (48)..(48): n is a, c, g, or t
  misc_feature (60)..(60): n is a, c, g, or t
  misc_feature (69)..(69): n is a, c, g, or t
  misc_feature (75)..(75): n is a, c, g, or t
  misc_feature (81)..(81): n is a, c, g, or t
  misc_feature (87)..(87): n is a, c, g, or t
  misc_feature (90)..(90): n is a, c, g, or t
  misc_feature (93)..(93): n is a, c, g, or t
  misc_feature (96)..(96): n is a, c, g, or t
  misc_feature (99)..(99): n is a, c, g, or t
  misc_feature (102)..(102): n is a, c, g, or t
  misc_feature (108)..(108): n is a, c, g, or t
  misc_feature (111)..(111): n is a, c, g, or t
  misc_feature (114)..(114): n is a, c, g, or t
  misc_feature (117)..(117): n is a, c, g, or t
  misc_feature (126)..(126): n is a, c, g, or t
  misc_feature (135)..(135): n is a, c, g, or t
  misc_feature (138)..(138): n is a, c, g, or t
  misc_feature (141)..(141): n is a, c, g, or t
  misc_feature (147)..(147): n is a, c, g, or t
  misc_feature (156)..(156): n is a, c, g, or t
  misc_feature (165)..(165): n is a, c, g, or t
  misc_feature (174)..(174): n is a, c, g, or t
  misc_feature (177)..(177): n is a, c, g, or t
  misc_feature (183)..(183): n is a, c, g, or t
  misc_feature (186)..(186): n is a, c, g, or t
  misc_feature (189)..(189): n is a, c, g, or t
  misc_feature (195)..(195): n is a, c, g, or t
  misc_feature (201)..(201): n is a, c, g, or t
  misc_feature (204)..(204): n is a, c, g, or t
  misc_feature (207)..(207): n is a, c, g, or t
  misc_feature (213)..(213): n is a, c, g, or t
  misc_feature (216)..(216): n is a, c, g, or t
  misc_feature (219)..(219): n is a, c, g, or t
  misc_feature (225)..(225): n is a, c, g, or t
  misc_feature (228)..(228): n is a, c, g, or t
  misc_feature (240)..(240): n is a, c, g, or t
  misc_feature (246)..(246): n is a, c, g, or t
  misc_feature (249)..(249): n is a, c, g, or t
  misc_feature (252)..(252): n is a, c, g, or t
  misc_feature (255)..(255): n is a, c, g, or t
  misc_feature (267)..(267): n is a, c, g, or t
  misc_feature (270)..(270): n is a, c, g, or t
  misc_feature (273)..(273): n is a, c, g, or t
  misc_feature (279)..(279): n is a, c, g, or t
  misc_feature (291)..(291): n is a, c, g, or t
  misc_feature (294)..(294): n is a, c, g, or t
  misc_feature (297)..(297): n is a, c, g, or t
  misc_feature (303)..(303): n is a, c, g, or t
  misc_feature (306)..(306): n is a, c, g, or t
  misc_feature (309)..(309): n is a, c, g, or t
  misc_feature (312)..(312): n is a, c, g, or t
  misc_feature (321)..(321): n is a, c, g, or t
  misc_feature (327)..(327): n is a, c, g, or t
  misc_feature (336)..(336): n is a, c, g, or t
  misc_feature (339)..(339): n is a, c, g, or t
  misc_feature (342)..(342): n is a, c, g, or t
  misc_feature (348)..(348): n is a, c, g, or t
  misc_feature (357)..(357): n is a, c, g, or t
  misc_feature (369)..(369): n is a, c, g, or t
  misc_feature (372)..(372): n is a, c, g, or t
  misc_feature (378)..(378): n is a, c, g, or t
  misc_feature (384)..(384): n is a, c, g, or t
  misc_feature (387)..(387): n is a, c, g, or t
  misc_feature (390)..(390): n is a, c, g, or t
  misc_feature (393)..(393): n is a, c, g, or t
  misc_feature (399)..(399): n is a, c, g, or t
gcngtnaarathwsnggngtnytnaargayggnacnggnaarccngtncaraaytgyacnathcarytnaargcnaarmgnaaywsnacnacngtngtngtnaayacnytngcnwsngaraayccngaygargcnggnmgntaywsnatggaygtngartayggncartaywsngtnathytnytngtngarggnttyccnccnwsncaygcnggnacnathacngtntaygargaywsncarccnggnacnytnaaygayttyytnggngcnatgacngargaygaygcnmgnccngargcnytnmgnmgnttygarytnatggtngargargtngcnmgncaygcngargargcnaaraaraaygcnggngargcngaracnwsngcnmgnaaygcn

SEQ ID NO: 727 - DNA, 399 bp, Artificial Sequence
  PfN-CNA21
  misc_feature (3)..(3): n is a, c, g, or t
  misc_feature (6)..(6): n is a, c, g, or t
  misc_feature (15)..(15): n is a, c, g, or t
  misc_feature (18)..(18): n is a, c, g, or t
  misc_feature (21)..(21): n is a, c, g, or t
  misc_feature (24)..(24): n is a, c, g, or t
  misc_feature (33)..(33): n is a, c, g, or t
  misc_feature (36)..(36): n is a, c, g, or t
  misc_feature (39)..(39): n is a, c, g, or t
  misc_feature (45)..(45): n is a, c, g, or t
  misc_feature (48)..(48): n is a, c, g, or t
  misc_feature (60)..(60): n is a, c, g, or t
  misc_feature (69)..(69): n is a, c, g, or t
  misc_feature (75)..(75): n is a, c, g, or t
  misc_feature (81)..(81): n is a, c, g, or t
  misc_feature (87)..(87): n is a, c, g, or t
  misc_feature (90)..(90): n is a, c, g, or t
  misc_feature (93)..(93): n is a, c, g, or t
  misc_feature (96)..(96): n is a, c, g, or t
  misc_feature (99)..(99): n is a, c, g, or t
  misc_feature (102)..(102): n is a, c, g, or t
  misc_feature (108)..(108): n is a, c, g, or t
  misc_feature (111)..(111): n is a, c, g, or t
  misc_feature (114)..(114): n is a, c, g, or t
  misc_feature (117)..(117): n is a, c, g, or t
  misc_feature (126)..(126): n is a, c, g, or t
  misc_feature (135)..(135): n is a, c, g, or t
  misc_feature (138)..(138): n is a, c, g, or t
  misc_feature (141)..(141): n is a, c, g, or t
  misc_feature (147)..(147): n is a, c, g, or t
  misc_feature (156)..(156): n is a, c, g, or t
  misc_feature (165)..(165): n is a, c, g, or t
  misc_feature (174)..(174): n is a, c, g, or t
  misc_feature (177)..(177): n is a, c, g, or t
  misc_feature (183)..(183): n is a, c, g, or t
  misc_feature (186)..(186): n is a, c, g, or t
  misc_feature (189)..(189): n is a, c, g, or t
  misc_feature (195)..(195): n is a, c, g, or t
  misc_feature (201)..(201): n is a, c, g, or t
  misc_feature (204)..(204): n is a, c, g, or t
  misc_feature (207)..(207): n is a, c, g, or t
  misc_feature (213)..(213): n is a, c, g, or t
  misc_feature (216)..(216): n is a, c, g, or t
  misc_feature (219)..(219): n is a, c, g, or t
  misc_feature (225)..(225): n is a, c, g, or t
  misc_feature (228)..(228): n is a, c, g, or t
  misc_feature (240)..(240): n is a, c, g, or t
  misc_feature (246)..(246): n is a, c, g, or t
  misc_feature (249)..(249): n is a, c, g, or t
  misc_feature (252)..(252): n is a, c, g, or t
  misc_feature (255)..(255): n is a, c, g, or t
  misc_feature (267)..(267): n is a, c, g, or t
  misc_feature (270)..(270): n is a, c, g, or t
  misc_feature (273)..(273): n is a, c, g, or t
  misc_feature (279)..(279): n is a, c, g, or t
  misc_feature (291)..(291): n is a, c, g, or t
  misc_feature (294)..(294): n is a, c, g, or t
  misc_feature (297)..(297): n is a, c, g, or t
  misc_feature (303)..(303): n is a, c, g, or t
  misc_feature (306)..(306): n is a, c, g, or t
  misc_feature (309)..(309): n is a, c, g, or t
  misc_feature (312)..(312): n is a, c, g, or t
  misc_feature (327)..(327): n is a, c, g, or t
  misc_feature (336)..(336): n is a, c, g, or t
  misc_feature (339)..(339): n is a, c, g, or t
  misc_feature (342)..(342): n is a, c, g, or t
  misc_feature (348)..(348): n is a, c, g, or t
  misc_feature (357)..(357): n is a, c, g, or t
  misc_feature (369)..(369): n is a, c, g, or t
  misc_feature (372)..(372): n is a, c, g, or t
  misc_feature (378)..(378): n is a, c, g, or t
  misc_feature (384)..(384): n is a, c, g, or t
  misc_feature (387)..(387): n is a, c, g, or t
  misc_feature (390)..(390): n is a, c, g, or t
  misc_feature (393)..(393): n is a, c, g, or t
  misc_feature (399)..(399): n is a, c, g, or t
gcngtnaarathwsnggngtnytnaargayggnacnggnaarccngtncaraaytgyacnathcarytnaargcnaarmgnaaywsnacnacngtngtngtnaayacnytngcnwsngaraayccngaygargcnggnmgntaywsnatggaygtngartayggncartaywsngtnathytnytngtngarggnttyccnccnwsncaygcnggnacnathacngtntaygargaywsncarccnggnacnytnaaygayttyytnggngcnatgacngargaygaygcnmgnccngargcnytnmgnmgnttygarcaratggtngargargcngcnmgncaygcngargargcnaaraaraaygcnggngargcngaracnwsngcnmgnaaygcn

SEQ ID NO: 728 - DNA, 399 bp, Artificial Sequence
  PfN-CNA22
  misc_feature (3)..(3): n is a, c, g, or t
  misc_feature (6)..(6): n is a, c, g, or t
  misc_feature (15)..(15): n is a, c, g, or t
  misc_feature (18)..(18): n is a, c, g, or t
  misc_feature (21)..(21): n is a, c, g, or t
  misc_feature (24)..(24): n is a, c, g, or t
  misc_feature (33)..(33): n is a, c, g, or t
  misc_feature (36)..(36): n is a, c, g, or t
  misc_feature (39)..(39): n is a, c, g, or t
  misc_feature (45)..(45): n is a, c, g, or t
  misc_feature (48)..(48): n is a, c, g, or t
  misc_feature (60)..(60): n is a, c, g, or t
  misc_feature (69)..(69): n is a, c, g, or t
  misc_feature (75)..(75): n is a, c, g, or t
  misc_feature (81)..(81): n is a, c, g, or t
  misc_feature (87)..(87): n is a, c, g, or t
  misc_feature (90)..(90): n is a, c, g, or t
  misc_feature (93)..(93): n is a, c, g, or t
  misc_feature (96)..(96): n is a, c, g, or t
  misc_feature (99)..(99): n is a, c, g, or t
  misc_feature (102)..(102): n is a, c, g, or t
  misc_feature (108)..(108): n is a, c, g, or t
  misc_feature (111)..(111): n is a, c, g, or t
  misc_feature (114)..(114): n is a, c, g, or t
  misc_feature (117)..(117): n is a, c, g, or t
  misc_feature (126)..(126): n is a, c, g, or t
  misc_feature (135)..(135): n is a, c, g, or t
  misc_feature (138)..(138): n is a, c, g, or t
  misc_feature (141)..(141): n is a, c, g, or t
  misc_feature (147)..(147): n is a, c, g, or t
  misc_feature (156)..(156): n is a, c, g, or t
  misc_feature (165)..(165): n is a, c, g, or t
  misc_feature (174)..(174): n is a, c, g, or t
  misc_feature (177)..(177): n is a, c, g, or t
  misc_feature (183)..(183): n is a, c, g, or t
  misc_feature (186)..(186): n is a, c, g, or t
  misc_feature (189)..(189): n is a, c, g, or t
  misc_feature (195)..(195): n is a, c, g, or t
  misc_feature (201)..(201): n is a, c, g, or t
  misc_feature (204)..(204): n is a, c, g, or t
  misc_feature (207)..(207): n is a, c, g, or t
  misc_feature (213)..(213): n is a, c, g, or t
  misc_feature (216)..(216): n is a, c, g, or t
  misc_feature (219)..(219): n is a, c, g, or t
  misc_feature (225)..(225): n is a, c, g, or t
  misc_feature (228)..(228): n is a, c, g, or t
  misc_feature (240)..(240): n is a, c, g, or t
  misc_feature (246)..(246): n is a, c, g, or t
  misc_feature (249)..(249): n is a, c, g, or t
  misc_feature (252)..(252): n is a, c, g, or t
  misc_feature (255)..(255): n is a, c, g, or t
  misc_feature (267)..(267): n is a, c, g, or t
  misc_feature (270)..(270): n is a, c, g, or t
  misc_feature (273)..(273): n is a, c, g, or t
  misc_feature (279)..(279): n is a, c, g, or t
  misc_feature (291)..(291): n is a, c, g, or t
  misc_feature (294)..(294): n is a, c, g, or t
  misc_feature (297)..(297): n is a, c, g, or t
  misc_feature (303)..(303): n is a, c, g, or t
  misc_feature (306)..(306): n is a, c, g, or t
  misc_feature (309)..(309): n is a, c, g, or t
  misc_feature (312)..(312): n is a, c, g, or t
  misc_feature (321)..(321): n is a, c, g, or t
  misc_feature (327)..(327): n is a, c, g, or t
  misc_feature (336)..(336): n is a, c, g, or t
  misc_feature (339)..(339): n is a, c, g, or t
  misc_feature (342)..(342): n is a, c, g, or t
  misc_feature (348)..(348): n is a, c, g, or t
  misc_feature (357)..(357): n is a, c, g, or t
  misc_feature (369)..(369): n is a, c, g, or t
  misc_feature (372)..(372): n is a, c, g, or t
  misc_feature (378)..(378): n is a, c, g, or t
  misc_feature (384)..(384): n is a, c, g, or t
  misc_feature (387)..(387): n is a, c, g, or t
  misc_feature (390)..(390): n is a, c, g, or t
  misc_feature (393)..(393): n is a, c, g, or t
  misc_feature (399)..(399): n is a, c, g, or t
gcngtnaarathwsnggngtnytnaargayggnacnggnaarccngtncaraaytgyacnathcarytnaargcnaarmgnaaywsnacnacngtngtngtnaayacnytngcnwsngaraayccngaygargcnggnmgntaywsnatggaygtngartayggncartaywsngtnathytnytngtngarggnttyccnccnwsncaygcnggnacnathacngtntaygargaywsncarccnggnacnytnaaygayttyytnggngcnatgwsngargaygaygtnmgnccngargcnytnmgnmgnttygarytnatggtngargargcngcnmgncaygcngargargcnaaraaraaygcnggngargcngaracnwsngcnmgnaaygcn

SEQ ID NO: 729 - DNA, 399 bp, Artificial Sequence
  PfN-CNA23
  misc_feature (3)..(3): n is a, c, g, or t
  misc_feature (6)..(6): n is a, c, g, or t
  misc_feature (15)..(15): n is a, c, g, or t
  misc_feature (18)..(18): n is a, c, g, or t
  misc_feature (21)..(21): n is a, c, g, or t
  misc_feature (24)..(24): n is a, c, g, or t
  misc_feature (33)..(33): n is a, c, g, or t
  misc_feature (36)..(36): n is a, c, g, or t
  misc_feature (39)..(39): n is a, c, g, or t
  misc_feature (45)..(45): n is a, c, g, or t
  misc_feature (48)..(48): n is a, c, g, or t
  misc_feature (60)..(60): n is a, c, g, or t
  misc_feature (69)..(69): n is a, c, g, or t
  misc_feature (75)..(75): n is a, c, g, or t
  misc_feature (81)..(81): n is a, c, g, or t
  misc_feature (87)..(87): n is a, c, g, or t
  misc_feature (90)..(90): n is a, c, g, or t
  misc_feature (93)..(93): n is a, c, g, or t
  misc_feature (96)..(96): n is a, c, g, or t
  misc_feature (99)..(99): n is a, c, g, or t
  misc_feature (102)..(102): n is a, c, g, or t
  misc_feature (108)..(108): n is a, c, g, or t
  misc_feature (111)..(111): n is a, c, g, or t
  misc_feature (114)..(114): n is a, c, g, or t
  misc_feature (117)..(117): n is a, c, g, or t
  misc_feature (126)..(126): n is a, c, g, or t
  misc_feature (135)..(135): n is a, c, g, or t
  misc_feature (138)..(138): n is a, c, g, or t
  misc_feature (141)..(141): n is a, c, g, or t
  misc_feature (147)..(147): n is a, c, g, or t
  misc_feature (156)..(156): n is a, c, g, or t
  misc_feature (165)..(165): n is a, c, g, or t
  misc_feature (174)..(174): n is a, c, g, or t
  misc_feature (177)..(177): n is a, c, g, or t
  misc_feature (183)..(183): n is a, c, g, or t
  misc_feature (186)..(186): n is a, c, g, or t
  misc_feature (189)..(189): n is a, c, g, or t
  misc_feature (195)..(195): n is a, c, g, or t
  misc_feature (201)..(201): n is a, c, g, or t
  misc_feature (204)..(204): n is a, c, g, or t
  misc_feature (207)..(207): n is a, c, g, or t
  misc_feature (213)..(213): n is a, c, g, or t
  misc_feature (216)..(216): n is a, c, g, or t
  misc_feature (219)..(219): n is a, c, g, or t
  misc_feature (225)..(225): n is a, c, g, or t
  misc_feature (228)..(228): n is a, c, g, or t
  misc_feature (240)..(240): n is a, c, g, or t
  misc_feature (246)..(246): n is a, c, g, or t
  misc_feature (249)..(249): n is a, c, g, or t
  misc_feature (252)..(252): n is a, c, g, or t
  misc_feature (255)..(255): n is a, c, g, or t
  misc_feature (267)..(267): n is a, c, g, or t
  misc_feature (270)..(270): n is a, c, g, or t
  misc_feature (273)..(273): n is a, c, g, or t
  misc_feature (279)..(279): n is a, c, g, or t
  misc_feature (291)..(291): n is a, c, g, or t
  misc_feature (294)..(294): n is a, c, g, or t
  misc_feature (297)..(297): n is a, c, g, or t
  misc_feature (303)..(303): n is a, c, g, or t
  misc_feature (306)..(306): n is a, c, g, or t
  misc_feature (309)..(309): n is a, c, g, or t
  misc_feature (312)..(312): n is a, c, g, or t
  misc_feature (321)..(321): n is a, c, g, or t
  misc_feature (327)..(327): n is a, c, g, or t
  misc_feature (336)..(336): n is a, c, g, or t
  misc_feature (339)..(339): n is a, c, g, or t
  misc_feature (342)..(342): n is a, c, g, or t
  misc_feature (348)..(348): n is a, c, g, or t
  misc_feature (357)..(357): n is a, c, g, or t
  misc_feature (369)..(369): n is a, c, g, or t
  misc_feature (372)..(372): n is a, c, g, or t
  misc_feature (378)..(378): n is a, c, g, or t
  misc_feature (384)..(384): n is a, c, g, or t
  misc_feature (387)..(387): n is a, c, g, or t
  misc_feature (390)..(390): n is a, c, g, or t
  misc_feature (393)..(393): n is a, c, g, or t
  misc_feature (399)..(399): n is a, c, g, or t
gcngtnaarathwsnggngtnytnaargayggnacnggnaarccngtncaraaytgyacnathcarytnaargcnaarmgnaaywsnwsnacngtngtngtnaayacnytngcnwsngaraayccngaygargcnggnmgntaywsnatggaygtngartayggncartaywsngtnathytnytngtngarggnttyccnccnwsncaygcnggnacnathacngtntaygargaywsncarccnggnacnytnaaygayttyytnggngcnatgwsngargaygaygtnmgnccngargcnytnmgnmgnttygarytnatggtngargargcngcnmgncaygcngargargcnaaraaraaygcnggngargcngaracnwsngcnmgnaaygcn

SEQ ID NO: 730 - DNA, 402 bp, Artificial Sequence
  PfN-CNA24
  misc_feature (3)..(3): n is a, c, g, or t
  misc_feature (6)..(6): n is a, c, g, or t
  misc_feature (9)..(9): n is a, c, g, or t
  misc_feature (18)..(18): n is a, c, g, or t
  misc_feature (21)..(21): n is a, c, g, or t
  misc_feature (24)..(24): n is a, c, g, or t
  misc_feature (27)..(27): n is a, c, g, or t
  misc_feature (36)..(36): n is a, c, g, or t
  misc_feature (39)..(39): n is a, c, g, or t
  misc_feature (42)..(42): n is a, c, g, or t
  misc_feature (48)..(48): n is a, c, g, or t
  misc_feature (63)..(63): n is a, c, g, or t
  misc_feature (72)..(72): n is a, c, g, or t
  misc_feature (78)..(78): n is a, c, g, or t
  misc_feature (81)..(81): n is a, c, g, or t
  misc_feature (84)..(84): n is a, c, g, or t
  misc_feature (90)..(90): n is a, c, g, or t
  misc_feature (93)..(93): n is a, c, g, or t
  misc_feature (96)..(96): n is a, c, g, or t
  misc_feature (99)..(99): n is a, c, g, or t
  misc_feature (102)..(102): n is a, c, g, or t
  misc_feature (105)..(105): n is a, c, g, or t
  misc_feature (111)..(111): n is a, c, g, or t
  misc_feature (114)..(114): n is a, c, g, or t
  misc_feature (117)..(117): n is a, c, g, or t
  misc_feature (120)..(120): n is a, c, g, or t
  misc_feature (129)..(129): n is a, c, g, or t
  misc_feature (138)..(138): n is a, c, g, or t
  misc_feature (141)..(141): n is a, c, g, or t
  misc_feature (144)..(144): n is a, c, g, or t
  misc_feature (150)..(150): n is a, c, g, or t
  misc_feature (159)..(159): n is a, c, g, or t
  misc_feature (168)..(168): n is a, c, g, or t
  misc_feature (177)..(177): n is a, c, g, or t
  misc_feature (180)..(180): n is a, c, g, or t
  misc_feature (183)..(183): n is a, c, g, or t
  misc_feature (186)..(186): n is a, c, g, or t
  misc_feature (189)..(189): n is a, c, g, or t
  misc_feature (192)..(192): n is a, c, g, or t
  misc_feature (198)..(198): n is a, c, g, or t
  misc_feature (204)..(204): n is a, c, g, or t
  misc_feature (207)..(207): n is a, c, g, or t
  misc_feature (210)..(210): n is a, c, g, or t
  misc_feature (216)..(216): n is a, c, g, or t
  misc_feature (219)..(219): n is a, c, g, or t
  misc_feature (222)..(222): n is a, c, g, or t
  misc_feature (228)..(228): n is a, c, g, or t
  misc_feature (231)..(231): n is a, c, g, or t
  misc_feature (243)..(243): n is a, c, g, or t
  misc_feature (249)..(249): n is a, c, g, or t
  misc_feature (252)..(252): n is a, c, g, or t
  misc_feature (255)..(255): n is a, c, g, or t
  misc_feature (258)..(258): n is a, c, g, or t
  misc_feature (270)..(270): n is a, c, g, or t
  misc_feature (273)..(273): n is a, c, g, or t
  misc_feature (276)..(276): n is a, c, g, or t
  misc_feature (282)..(282): n is a, c, g, or t
  misc_feature (294)..(294): n is a, c, g, or t
  misc_feature (297)..(297): n is a, c, g, or t
  misc_feature (300)..(300): n is a, c, g, or t
  misc_feature (306)..(306): n is a, c, g, or t
  misc_feature (309)..(309): n is a, c, g, or t
  misc_feature (312)..(312): n is a, c, g, or t
  misc_feature (315)..(315): n is a, c, g, or t
  misc_feature (330)..(330): n is a, c, g, or t
  misc_feature (339)..(339): n is a, c, g, or t
  misc_feature (342)..(342): n is a, c, g, or t
  misc_feature (345)..(345): n is a, c, g, or t
  misc_feature (351)..(351): n is a, c, g, or t
  misc_feature (360)..(360): n is a, c, g, or t
  misc_feature (372)..(372): n is a, c, g, or t
  misc_feature (375)..(375): n is a, c, g, or t
  misc_feature (381)..(381): n is a, c, g, or t
  misc_feature (387)..(387): n is a, c, g, or t
  misc_feature (390)..(390): n is a, c, g, or t
  misc_feature (393)..(393): n is a, c, g, or t
  misc_feature (396)..(396): n is a, c, g, or t
  misc_feature (402)..(402): n is a, c, g, or t
gcngcngtncarathwsnggngtnytnaargayggngcnggnaarccnathcaraaytgyacnathcarytnaargcnmgnmgnaaywsnacnacngtngtngtnaayacngtngcnwsngaraayccngaygargcnggnmgntaywsnatggaygtngartayggncartaywsngtnacnytnytngtngarggnttyccnccnwsncaygcnggnacnathwsngtntaygargaywsncarccnggnacnytnaaygayttyytnggngcnatgacngargaygaygcnmgnccngargcnytnmgnmgnttygarcaratggtngargargcngcnmgncaygcngargargcnaaraaraaygcnggngargcngaracnwsngcnmgnaaygcn

SEQ ID NO: 731 - DNA, 402 bp, Artificial Sequence
  PfN-CNA25
  misc_feature (3)..(3): n is a, c, g, or t
  misc_feature (6)..(6): n is a, c, g, or t
  misc_feature (9)..(9): n is a, c, g, or t
  misc_feature (18)..(18): n is a, c, g, or t
  misc_feature (21)..(21): n is a, c, g, or t
  misc_feature (24)..(24): n is a, c, g, or t
  misc_feature (27)..(27): n is a, c, g, or t
  misc_feature (36)..(36): n is a, c, g, or t
  misc_feature (39)..(39): n is a, c, g, or t
  misc_feature (42)..(42): n is a, c, g, or t
  misc_feature (48)..(48): n is a, c, g, or t
  misc_feature (63)..(63): n is a, c, g, or t
  misc_feature (72)..(72): n is a, c, g, or t
  misc_feature (78)..(78): n is a, c, g, or t
  misc_feature (81)..(81): n is a, c, g, or t
  misc_feature (84)..(84): n is a, c, g, or t
  misc_feature (90)..(90): n is a, c, g, or t
  misc_feature (93)..(93): n is a, c, g, or t
  misc_feature (96)..(96): n is a, c, g, or t
  misc_feature (99)..(99): n is a, c, g, or t
  misc_feature (102)..(102): n is a, c, g, or t
  misc_feature (105)..(105): n is a, c, g, or t
  misc_feature (111)..(111): n is a, c, g, or t
  misc_feature (114)..(114): n is a, c, g, or t
  misc_feature (117)..(117): n is a, c, g, or t
  misc_feature (120)..(120): n is a, c, g, or t
  misc_feature (129)..(129): n is a, c, g, or t
  misc_feature (138)..(138): n is a, c, g, or t
  misc_feature (141)..(141): n is a, c, g, or t
  misc_feature (144)..(144): n is a, c, g, or t
  misc_feature (150)..(150): n is a, c, g, or t
  misc_feature (159)..(159): n is a, c, g, or t
  misc_feature (168)..(168): n is a, c, g, or t
  misc_feature (177)..(177): n is a, c, g, or t
  misc_feature (180)..(180): n is a, c, g, or t
  misc_feature (183)..(183): n is a, c, g, or t
  misc_feature (186)..(186): n is a, c, g, or t
  misc_feature (189)..(189): n is a, c, g, or t
  misc_feature (192)..(192): n is a, c, g, or t
  misc_feature (198)..(198): n is a, c, g, or t
  misc_feature (204)..(204): n is a, c, g, or t
  misc_feature (207)..(207): n is a, c, g, or t
  misc_feature (210)..(210): n is a, c, g, or t
  misc_feature (216)..(216): n is a, c, g, or t
  misc_feature (219)..(219): n is a, c, g, or t
  misc_feature (222)..(222): n is a, c, g, or t
  misc_feature (228)..(228): n is a, c, g, or t
  misc_feature (231)..(231): n is a, c, g, or t
  misc_feature (243)..(243): n is a, c, g, or t
  misc_feature (249)..(249): n is a, c, g, or t
  misc_feature (252)..(252): n is a, c, g, or t
  misc_feature (255)..(255): n is a, c, g, or t
  misc_feature (258)..(258): n is a, c, g, or t
  misc_feature (270)..(270): n is a, c, g, or t
  misc_feature (273)..(273): n is a, c, g, or t
  misc_feature (276)..(276): n is a, c, g, or t
  misc_feature (282)..(282): n is a, c, g, or t
  misc_feature (294)..(294): n is a, c, g, or t
  misc_feature (297)..(297): n is a, c, g, or t
  misc_feature (300)..(300): n is a, c, g, or t
  misc_feature (306)..(306): n is a, c, g, or t
  misc_feature (309)..(309): n is a, c, g, or t
  misc_feature (312)..(312): n is a, c, g, or t
  misc_feature (315)..(315): n is a, c, g, or t
  misc_feature (324)..(324): n is a, c, g, or t
  misc_feature (330)..(330): n is a, c, g, or t
  misc_feature (339)..(339): n is a, c, g, or t
  misc_feature (342)..(342): n is a, c, g, or t
  misc_feature (345)..(345): n is a, c, g, or t
  misc_feature (351)..(351): n is a, c, g, or t
  misc_feature (360)..(360): n is a, c, g, or t
  misc_feature (372)..(372): n is a, c, g, or t
  misc_feature (375)..(375): n is a, c, g, or t
  misc_feature (381)..(381): n is a, c, g, or t
  misc_feature (387)..(387): n is a, c, g, or t
  misc_feature (390)..(390): n is a, c, g, or t
  misc_feature (393)..(393): n is a, c, g, or t
  misc_feature (396)..(396): n is a, c, g, or t
  misc_feature (402)..(402): n is a, c, g, or t
gcngcngtncarathwsnggngtnytnaargayggngcnggnaarccnathcaraaytgyacnathcarytnaargcnmgnmgnaaywsnacnacngtngtngtnaayacngtngcnwsngaraayccngaygargcnggnmgntaywsnatggaygtngartayggncartaywsngtnacnytnytngtngarggnttyccnccnwsncaygcnggnacnathacngtntaygargaywsncarccnggnacnytnaaygayttyytnggngcnatgwsngargaygaygtnmgnccngargcnytnmgnmgnttygarytnatggtngargargcngcnmgncaygcngargargcnaaraaraaygcnggngargcngaracnwsngcnmgnaaygcn

SEQ ID NO: 732 - DNA, 399 bp, Artificial Sequence
  PfN-CNA26
  misc_feature (3)..(3): n is a, c, g, or t
  misc_feature (6)..(6): n is a, c, g, or t
  misc_feature (15)..(15): n is a, c, g, or t
  misc_feature (18)..(18): n is a, c, g, or t
  misc_feature (21)..(21): n is a, c, g, or t
  misc_feature (24)..(24): n is a, c, g, or t
  misc_feature (33)..(33): n is a, c, g, or t
  misc_feature (36)..(36): n is a, c, g, or t
  misc_feature (39)..(39): n is a, c, g, or t
  misc_feature (45)..(45): n is a, c, g, or t
  misc_feature (60)..(60): n is a, c, g, or t
  misc_feature (69)..(69): n is a, c, g, or t
  misc_feature (75)..(75): n is a, c, g, or t
  misc_feature (78)..(78): n is a, c, g, or t
  misc_feature (81)..(81): n is a, c, g, or t
  misc_feature (87)..(87): n is a, c, g, or t
  misc_feature (90)..(90): n is a, c, g, or t
  misc_feature (93)..(93): n is a, c, g, or t
  misc_feature (96)..(96): n is a, c, g, or t
  misc_feature (99)..(99): n is a, c, g, or t
  misc_feature (102)..(102): n is a, c, g, or t
  misc_feature (108)..(108): n is a, c, g, or t
  misc_feature (111)..(111): n is a, c, g, or t
  misc_feature (114)..(114): n is a, c, g, or t
  misc_feature (117)..(117): n is a, c, g, or t
  misc_feature (126)..(126): n is a, c, g, or t
  misc_feature (135)..(135): n is a, c, g, or t
  misc_feature (138)..(138): n is a, c, g, or t
  misc_feature (141)..(141): n is a, c, g, or t
  misc_feature (147)..(147): n is a, c, g, or t
  misc_feature (156)..(156): n is a, c, g, or t
  misc_feature (165)..(165): n is a, c, g, or t
  misc_feature (174)..(174): n is a, c, g, or t
  misc_feature (177)..(177): n is a, c, g, or t
  misc_feature (180)..(180): n is a, c, g, or t
  misc_feature (183)..(183): n is a, c, g, or t
  misc_feature (186)..(186): n is a, c, g, or t
  misc_feature (189)..(189): n is a, c, g, or t
  misc_feature (195)..(195): n is a, c, g, or t
  misc_feature (201)..(201): n is a, c, g, or t
  misc_feature (204)..(204): n is a, c, g, or t
  misc_feature (207)..(207): n is a, c, g, or t
  misc_feature (213)..(213): n is a, c, g, or t
  misc_feature (216)..(216): n is a, c, g, or t
  misc_feature (219)..(219): n is a, c, g, or t
  misc_feature (225)..(225): n is a, c, g, or t
  misc_feature (228)..(228): n is a, c, g, or t
  misc_feature (240)..(240): n is a, c, g, or t
  misc_feature (246)..(246): n is a, c, g, or t
  misc_feature (249)..(249): n is a, c, g, or t
  misc_feature (252)..(252): n is a, c, g, or t
  misc_feature (255)..(255): n is a, c, g, or t
  misc_feature (267)..(267): n is a, c, g, or t
  misc_feature (270)..(270): n is a, c, g, or t
  misc_feature (273)..(273): n is a, c, g, or t
  misc_feature (279)..(279): n is a, c, g, or t
  misc_feature (291)..(291): n is a, c, g, or t
  misc_feature (294)..(294): n is a, c, g, or t
  misc_feature (297)..(297): n is a, c, g, or t
  misc_feature (303)..(303): n is a, c, g, or t
  misc_feature (309)..(309): n is a, c, g, or t
  misc_feature (312)..(312): n is a, c, g, or t
  misc_feature (321)..(321): n is a, c, g, or t
  misc_feature (327)..(327): n is a, c, g, or t
  misc_feature (336)..(336): n is a, c, g, or t
  misc_feature (339)..(339): n is a, c, g, or t
  misc_feature (342)..(342): n is a, c, g, or t
  misc_feature (348)..(348): n is a, c, g, or t
  misc_feature (357)..(357): n is a, c, g, or t
  misc_feature (369)..(369): n is a, c, g, or t
  misc_feature (372)..(372): n is a, c, g, or t
  misc_feature (378)..(378): n is a, c, g, or t
  misc_feature (384)..(384): n is a, c, g, or t
  misc_feature (387)..(387): n is a, c, g, or t
  misc_feature (390)..(390): n is a, c, g, or t
  misc_feature (393)..(393): n is a, c, g, or t
  misc_feature (399)..(399): n is a, c, g, or t
gcngtnaarathwsnggngtnytnaargayggnacnggnaarccnathcaraaytgyacnathcarytnaargcnmgnmgnaaywsnacnacngtngtngtnaayacngtngcnwsngaraayccngaygargcnggnmgntaywsnatggaygtngartayggncartaywsngtnacnytnytngtngarggnttyccnccnwsncaygcnggnacnathacngtntaygargaywsncarccnggnacnytnaaygayttyytnggngcnatgwsngargaygaygtnmgnccngargcnatgmgnmgnttygarytnatggtngargargcngcnmgncaygcngargargcnaaraaraaygcnggngargcngaracnwsngcnmgnaaygcn

SEQ ID NO: 733 - DNA, 399 bp, Artificial Sequence
  PfN-CNA27
  misc_feature (3)..(3): n is a, c, g, or t
  misc_feature (6)..(6): n is a, c, g, or t
  misc_feature (15)..(15): n is a, c, g, or t
  misc_feature (18)..(18): n is a, c, g, or t
  misc_feature (21)..(21): n is a, c, g, or t
  misc_feature (24)..(24): n is a, c, g, or t
  misc_feature (33)..(33): n is a, c, g, or t
  misc_feature (36)..(36): n is a, c, g, or t
  misc_feature (39)..(39): n is a, c, g, or t
  misc_feature (45)..(45): n is a, c, g, or t
  misc_feature (48)..(48): n is a, c, g, or t
  misc_feature (60)..(60): n is a, c, g, or t
  misc_feature (69)..(69): n is a, c, g, or t
  misc_feature (75)..(75): n is a, c, g, or t
  misc_feature (81)..(81): n is a, c, g, or t
  misc_feature (87)..(87): n is a, c, g, or t
  misc_feature (90)..(90): n is a, c, g, or t
  misc_feature (93)..(93): n is a, c, g, or t
  misc_feature (96)..(96): n is a, c, g, or t
  misc_feature (99)..(99): n is a, c, g, or t
  misc_feature (102)..(102): n is a, c, g, or t
  misc_feature (108)..(108): n is a, c, g, or t
  misc_feature (111)..(111): n is a, c, g, or t
  misc_feature (114)..(114): n is a, c, g, or t
  misc_feature (117)..(117): n is a, c, g, or t
  misc_feature (126)..(126): n is a, c, g, or t
  misc_feature (135)..(135): n is a, c, g, or t
  misc_feature (138)..(138): n is a, c, g, or t
  misc_feature (141)..(141): n is a, c, g, or t
  misc_feature (147)..(147): n is a, c, g, or t
  misc_feature (156)..(156): n is a, c, g, or t
  misc_feature (165)..(165): n is a, c, g, or t
  misc_feature (174)..(174): n is a, c, g, or t
  misc_feature (177)..(177): n is a, c, g, or t
  misc_feature (180)..(180): n is a, c, g, or t
  misc_feature (183)..(183): n is a, c, g, or t
  misc_feature (186)..(186): n is a, c, g, or t
  misc_feature (189)..(189): n is a, c, g, or t
  misc_feature (195)..(195): n is a, c, g, or t
  misc_feature (201)..(201): n is a, c, g, or t
  misc_feature (204)..(204): n is a, c, g, or t
  misc_feature (207)..(207): n is a, c, g, or t
  misc_feature (213)..(213): n is a, c, g, or t
  misc_feature (216)..(216): n is a, c, g, or t
  misc_feature (219)..(219): n is a, c, g, or t
  misc_feature (225)..(225): n is a, c, g, or t
  misc_feature (228)..(228): n is a, c, g, or t
  misc_feature (240)..(240): n is a, c, g, or t
  misc_feature (246)..(246): n is a, c, g, or t
  misc_feature (249)..(249): n is a, c, g, or t
  misc_feature (252)..(252): n is a, c, g, or t
  misc_feature (255)..(255): n is a, c, g, or t
  misc_feature (267)..(267): n is a, c, g, or t
  misc_feature (270)..(270): n is a, c, g, or t
  misc_feature (273)..(273): n is a, c, g, or t
  misc_feature (279)..(279): n is a, c, g, or t
  misc_feature (291)..(291): n is a, c, g, or t
  misc_feature (294)..(294): n is a, c, g, or t
  misc_feature (297)..(297): n is a, c, g, or t
  misc_feature (303)..(303): n is a, c, g, or t
  misc_feature (306)..(306): n is a, c, g, or t
  misc_feature (309)..(309): n is a, c, g, or t
  misc_feature (312)..(312): n is a, c, g, or t
  misc_feature (327)..(327): n is a, c, g, or t
  misc_feature (336)..(336): n is a, c, g, or t
  misc_feature (339)..(339): n is a, c, g, or t
  misc_feature (342)..(342): n is a, c, g, or t
  misc_feature (348)..(348): n is a, c, g, or t
  misc_feature (351)..(351): n is a, c, g, or t
  misc_feature (357)..(357): n is a, c, g, or t
  misc_feature (369)..(369): n is a, c, g, or t
  misc_feature (372)..(372): n is a, c, g, or t
  misc_feature (378)..(378): n is a, c, g, or t
  misc_feature (384)..(384): n is a, c, g, or t
  misc_feature (387)..(387): n is a, c, g, or t
  misc_feature (390)..(390): n is a, c, g, or t
  misc_feature (393)..(393): n is a, c, g, or t
  misc_feature (399)..(399): n is a, c, g, or t
gcngtnaarathwsnggngtnytnaargayggnacnggnaarccngtncaraaytgyacnathcarytnaargcnaarmgnaaywsnacnacngtngtngtnaayacngtngcnwsngaraayccngaygargcnggnmgntaywsnatggaygtngartayggncartaywsngtnacnytnytngtngarggnttyccnccnwsncaygcnggnacnathacngtntaygargaywsncarccnggnacnytnaaygayttyytnggngcnatgwsngargaygaygtnmgnccngargcnytnmgnmgnttygarcaratggtngargargcngcnmgncaygcnggngargcnaaraaraaygcnggngargcngaracnwsngcnmgnaaygcn

SEQ ID NO: 734 - DNA, 399 bp, Artificial Sequence
  PfN-CNA28
  misc_feature (3)..(3): n is a, c, g, or t
  misc_feature (6)..(6): n is a, c, g, or t
  misc_feature (15)..(15): n is a, c, g, or t
  misc_feature (18)..(18): n is a, c, g, or t
  misc_feature (21)..(21): n is a, c, g, or t
  misc_feature (24)..(24): n is a, c, g, or t
  misc_feature (33)..(33): n is a, c, g, or t
  misc_feature (36)..(36): n is a, c, g, or t
  misc_feature (39)..(39): n is a, c, g, or t
  misc_feature (45)..(45): n is a, c, g, or t
  misc_feature (48)..(48): n is a, c, g, or t
  misc_feature (60)..(60): n is a, c, g, or t
  misc_feature (69)..(69): n is a, c, g, or t
  misc_feature (75)..(75): n is a, c, g, or t
  misc_feature (78)..(78): n is a, c, g, or t
  misc_feature (81)..(81): n is a, c, g, or t
  misc_feature (87)..(87): n is a, c, g, or t
  misc_feature (90)..(90): n is a, c, g, or t
  misc_feature (93)..(93): n is a, c, g, or t
  misc_feature (96)..(96): n is a, c, g, or t
  misc_feature (99)..(99): n is a, c, g, or t
  misc_feature (102)..(102): n is a, c, g, or t
  misc_feature (108)..(108): n is a, c, g, or t
  misc_feature (111)..(111): n is a, c, g, or t
  misc_feature (114)..(114): n is a, c, g, or t
  misc_feature (117)..(117): n is a, c, g, or t
  misc_feature (126)..(126): n is a, c, g, or t
  misc_feature (135)..(135): n is a, c, g, or t
  misc_feature (138)..(138): n is a, c, g, or t
  misc_feature (141)..(141): n is a, c, g, or t
  misc_feature (147)..(147): n is a, c, g, or t
  misc_feature (156)..(156): n is a, c, g, or t
  misc_feature (165)..(165): n is a, c, g, or t
  misc_feature (174)..(174): n is a, c, g, or t
  misc_feature (177)..(177): n is a, c, g, or t
  misc_feature (183)..(183): n is a, c, g, or t
  misc_feature (186)..(186): n is a, c, g, or t
  misc_feature (189)..(189): n is a, c, g, or t
  misc_feature (195)..(195): n is a, c, g, or t
  misc_feature (201)..(201): n is a, c, g, or t
  misc_feature (204)..(204): n is a, c, g, or t
  misc_feature (207)..(207): n is a, c, g, or t
  misc_feature (213)..(213): n is a, c, g, or t
  misc_feature (216)..(216): n is a, c, g, or t
  misc_feature (219)..(219): n is a, c, g, or t
  misc_feature (225)..(225): n is a, c, g, or t
  misc_feature (228)..(228): n is a, c, g, or t
  misc_feature (240)..(240): n is a, c, g, or t
  misc_feature (246)..(246): n is a, c, g, or t
  misc_feature (249)..(249): n is a, c, g, or t
  misc_feature (252)..(252): n is a, c, g, or t
  misc_feature (255)..(255): n is a, c, g, or t
  misc_feature (267)..(267): n is a, c, g, or t
  misc_feature (270)..(270): n is a, c, g, or t
  misc_feature (273)..(273): n is a, c, g, or t
  misc_feature (279)..(279): n is a, c, g, or t
  misc_feature (291)..(291): n is a, c, g, or t
  misc_feature (294)..(294): n is a, c, g, or t
  misc_feature (297)..(297): n is a, c, g, or t
  misc_feature (303)..(303): n is a, c, g, or t
  misc_feature (306)..(306): n is a, c, g, or t
  misc_feature (309)..(309): n is a, c, g, or t
  misc_feature (312)..(312): n is a, c, g, or t
  misc_feature (321)..(321): n is a, c, g, or t
  misc_feature (327)..(327): n is a, c, g, or t
  misc_feature (336)..(336): n is a, c, g, or t
  misc_feature (339)..(339): n is a, c, g, or t
  misc_feature (342)..(342): n is a, c, g, or t
  misc_feature (348)..(348): n is a, c, g, or t
  misc_feature (357)..(357): n is a, c, g, or t
  misc_feature (369)..(369): n is a, c, g, or t
  misc_feature (372)..(372): n is a, c, g, or t
  misc_feature (378)..(378): n is a, c, g, or t
  misc_feature (384)..(384): n is a, c, g, or t
  misc_feature (387)..(387): n is a, c, g, or t
  misc_feature (390)..(390): n is a, c, g, or t
  misc_feature (393)..(393): n is a, c, g, or t
  misc_feature (399)..(399): n is a, c, g, or t
gcngtnaarathwsnggngtnytnaargayggnacnggnaarccngtngaraaytgyacnathcarytnaargcnmgnmgnaaywsngcnacngtngtngtnaayacngtngcnwsngaraayccngaygargcnggnmgntaywsnatggaygtngartayggncartaywsngtnathytnytngtngarggnttyccnccnwsncaygcnggnacnathacngtntaygargaywsncarccnggnacnytnaaygayttyytnggngcnatgwsngargaygaygtnmgnccngargcnytnmgnmgnttygarytnatggtngargargcngcnmgncaygcngargargcnaaraaraaygcnggngargcngaracnwsngcnmgnaaygcn

SEQ ID NO: 735 - DNA, 399 bp, Artificial Sequence
  PfN-CNA29
  misc_feature (3)..(3): n is a, c, g, or t
  misc_feature (6)..(6): n is a, c, g, or t
  misc_feature (15)..(15): n is a, c, g, or t
  misc_feature (18)..(18): n is a, c, g, or t
  misc_feature (21)..(21): n is a, c, g, or t
  misc_feature (24)..(24): n is a, c, g, or t
  misc_feature (33)..(33): n is a, c, g, or t
  misc_feature (36)..(36): n is a, c, g, or t
  misc_feature (39)..(39): n is a, c, g, or t
  misc_feature (45)..(45): n is a, c, g, or t
  misc_feature (48)..(48): n is a, c, g, or t
  misc_feature (60)..(60): n is a, c, g, or t
  misc_feature (69)..(69): n is a, c, g, or t
  misc_feature (75)..(75): n is a, c, g, or t
  misc_feature (78)..(78): n is a, c, g, or t
  misc_feature (81)..(81): n is a, c, g, or t
  misc_feature (87)..(87): n is a, c, g, or t
  misc_feature (90)..(90): n is a, c, g, or t
  misc_feature (93)..(93): n is a, c, g, or t
  misc_feature (96)..(96): n is a, c, g, or t
  misc_feature (99)..(99): n is a, c, g, or t
  misc_feature (102)..(102): n is a, c, g, or t
  misc_feature (108)..(108): n is a, c, g, or t
  misc_feature (111)..(111): n is a, c, g, or t
  misc_feature (114)..(114): n is a, c, g, or t
  misc_feature (117)..(117): n is a, c, g, or t
  misc_feature (126)..(126): n is a, c, g, or t
  misc_feature (135)..(135): n is a, c, g, or t
  misc_feature (138)..(138): n is a, c, g, or t
  misc_feature (141)..(141): n is a, c, g, or t
  misc_feature (147)..(147): n is a, c, g, or t
  misc_feature (156)..(156): n is a, c, g, or t
  misc_feature (165)..(165): n is a, c, g, or t
  misc_feature (174)..(174): n is a, c, g, or t
  misc_feature (177)..(177): n is a, c, g, or t
  misc_feature (183)..(183): n is a, c, g, or t
  misc_feature (186)..(186): n is a, c, g, or t
  misc_feature (189)..(189): n is a, c, g, or t
  misc_feature (195)..(195): n is a, c, g, or t
  misc_feature (201)..(201): n is a, c, g, or t
  misc_feature (204)..(204): n is a, c, g, or t
  misc_feature (207)..(207): n is a, c, g, or t
  misc_feature (213)..(213): n is a, c, g, or t
  misc_feature (216)..(216): n is a, c, g, or t
  misc_feature (219)..(219): n is a, c, g, or t
  misc_feature (225)..(225): n is a, c, g, or t
  misc_feature (228)..(228): n is a, c, g, or t
  misc_feature (240)..(240): n is a, c, g, or t
  misc_feature (246)..(246): n is a, c, g, or t
  misc_feature (249)..(249): n is a, c, g, or t
  misc_feature (252)..(252): n is a, c, g, or t
  misc_feature (255)..(255): n is a, c, g, or t
  misc_feature (267)..(267): n is a, c, g, or t
  misc_feature (270)..(270): n is a, c, g, or t
  misc_feature (273)..(273): n is a, c, g, or t
  misc_feature (279)..(279): n is a, c, g, or t
  misc_feature (291)..(291): n is a, c, g, or t
  misc_feature (294)..(294): n is a, c, g, or t
  misc_feature (297)..(297): n is a, c, g, or t
  misc_feature (303)..(303): n is a, c, g, or t
  misc_feature (306)..(306): n is a, c, g, or t
  misc_feature (309)..(309): n is a, c, g, or t
  misc_feature (312)..(312): n is a, c, g, or t
  misc_feature (321)..(321): n is a, c, g, or t
  misc_feature (327)..(327): n is a, c, g, or t
  misc_feature (336)..(336): n is a, c, g, or t
  misc_feature (339)..(339): n is a, c, g, or t
  misc_feature (342)..(342): n is a, c, g, or t
  misc_feature (348)..(348): n is a, c, g, or t
  misc_feature (357)..(357): n is a, c, g, or t
  misc_feature (369)..(369): n is a, c, g, or t
  misc_feature (372)..(372): n is a, c, g, or t
  misc_feature (378)..(378): n is a, c, g, or t
  misc_feature (384)..(384): n is a, c, g, or t
  misc_feature (387)..(387): n is a, c, g, or t
  misc_feature (390)..(390): n is a, c, g, or t
  misc_feature (393)..(393): n is a, c, g, or t
  misc_feature (399)..(399): n is a, c, g, or t
gcngtnaarathwsnggngtnytnaargayggnacnggnaarccngtngaraaytgyacnathcarytnaargcnmgnmgnaaywsngcnacngtngtngtnaayacngtngcnwsngaraayccngaygargcnggnmgntaywsnatggaygtngartayggncartaywsngtnathytnytngtngarggnttyccnwsnwsncaygcnggnacnathacngtntaygargaywsncarccnggnacnytnaaygayttyytnggngcnatgwsngargaygaygtnmgnccngargcnytnmgnmgnttygarytnatggtngargargcngcnmgncaygcngargargcnaaraaraaygcnggngargcngaracnwsngcnmgnaaygcn

SEQ ID NO: 736 - DNA, 399 bp, Artificial Sequence
  PfN-CNA30
  misc_feature (3)..(3): n is a, c, g, or t
  misc_feature (6)..(6): n is a, c, g, or t
  misc_feature (15)..(15): n is a, c, g, or t
  misc_feature (18)..(18): n is a, c, g, or t
  misc_feature (21)..(21): n is a, c, g, or t
  misc_feature (24)..(24): n is a, c, g, or t
  misc_feature (33)..(33): n is a, c, g, or t
  misc_feature (36)..(36): n is a, c, g, or t
  misc_feature (39)..(39): n is a, c, g, or t
  misc_feature (45)..(45): n is a, c, g, or t
  misc_feature (48)..(48): n is a, c, g, or t
  misc_feature (60)..(60): n is a, c, g, or t
  misc_feature (69)..(69): n is a, c, g, or t
  misc_feature (75)..(75): n is a, c, g, or t
  misc_feature (78)..(78): n is a, c, g, or t
  misc_feature (81)..(81): n is a, c, g, or t
  misc_feature (87)..(87): n is a, c, g, or t
  misc_feature (90)..(90): n is a, c, g, or t
  misc_feature (93)..(93): n is a, c, g, or t
  misc_feature (96)..(96): n is a, c, g, or t
  misc_feature (99)..(99): n is a, c, g, or t
  misc_feature (102)..(102): n is a, c, g, or t
  misc_feature (108)..(108): n is a, c, g, or t
  misc_feature (111)..(111): n is a, c, g, or t
  misc_feature (114)..(114): n is a, c, g, or t
  misc_feature (117)..(117): n is a, c, g, or t
  misc_feature (126)..(126): n is a, c, g, or t
  misc_feature (135)..(135): n is a, c, g, or t
  misc_feature (138)..(138): n is a, c, g, or t
  misc_feature (141)..(141): n is a, c, g, or t
  misc_feature (147)..(147): n is a, c, g, or t
  misc_feature (156)..(156): n is a, c, g, or t
  misc_feature (165)..(165): n is a, c, g, or t
  misc_feature (174)..(174): n is a, c, g, or t
  misc_feature (177)..(177): n is a, c, g, or t
  misc_feature (183)..(183): n is a, c, g, or t
  misc_feature (186)..(186): n is a, c, g, or t
  misc_feature (189)..(189): n is a, c, g, or t
  misc_feature (195)..(195): n is a, c, g, or t
  misc_feature (201)..(201): n is a, c, g, or t
  misc_feature (204)..(204): n is a, c, g, or t
  misc_feature (207)..(207): n is a, c, g, or t
  misc_feature (213)..(213): n is a, c, g, or t
  misc_feature (216)..(216): n is a, c, g, or t
  misc_feature (219)..(219): n is a, c, g, or t
  misc_feature (225)..(225): n is a, c, g, or t
  misc_feature (228)..(228): n is a, c, g, or t
  misc_feature (240)..(240): n is a, c, g, or t
  misc_feature (246)..(246): n is a, c, g, or t
  misc_feature (249)..(249): n is a, c, g, or t
  misc_feature (252)..(252): n is a, c, g, or t
  misc_feature (255)..(255): n is a, c, g, or t
  misc_feature (267)..(267): n is a, c, g, or t
  misc_feature (270)..(270): n is a, c, g, or t
  misc_feature (273)..(273): n is a, c, g, or t
  misc_feature (279)..(279): n is a, c, g, or t
  misc_feature (291)..(291): n is a, c, g, or t
  misc_feature (294)..(294): n is a, c, g, or t
  misc_feature (297)..(297): n is a, c, g, or t
  misc_feature (303)..(303): n is a, c, g, or t
  misc_feature (306)..(306): n is a, c, g, or t
  misc_feature (309)..(309): n is a, c, g, or t
  misc_feature (312)..(312): n is a, c, g, or t
  misc_feature (321)..(321): n is a, c, g, or t
  misc_feature (327)..(327): n is a, c, g, or t
  misc_feature (336)..(336): n is a, c, g, or t
  misc_feature (339)..(339): n is a, c, g, or t
  misc_feature (342)..(342): n is a, c, g, or t
  misc_feature (348)..(348): n is a, c, g, or t
  misc_feature (357)..(357): n is a, c, g, or t
  misc_feature (369)..(369): n is a, c, g, or t
  misc_feature (372)..(372): n is a, c, g, or t
  misc_feature (378)..(378): n is a, c, g, or t
  misc_feature (384)..(384): n is a, c, g, or t
  misc_feature (387)..(387): n is a, c, g, or t
  misc_feature (390)..(390): n is a, c, g, or t
  misc_feature (393)..(393): n is a, c, g, or t
  misc_feature (399)..(399): n is a, c, g, or t
gcngtnaarathwsnggngtnytnaargayggnacnggnaarccngtngaraaytgyacnathcarytnaargcnmgnmgnaaywsngcnacngtngtngtnaayacngtngcnwsngaraayccngaygargcnggnmgntaywsnatggaygtngartayggncartaywsngtnathytnytngtngarggnttyccnccnwsncaygcnggnacnathacngtntaygargaywsncarccnggnacnytnaaygayttyytnggngcnatgwsngargaygaygtnmgnccngargcnytnmgnmgnttygarytnatggtngargargtngcnmgncaygcngargargcnaaraaraaygcnggngargcngaracnwsngcnmgnaaygcn

SEQ ID NO: 737 - DNA, 399 bp, Artificial Sequence
  PfN-CNA31
  misc_feature (3)..(3): n is a, c, g, or t
  misc_feature (6)..(6): n is a, c, g, or t
  misc_feature (15)..(15): n is a, c, g, or t
  misc_feature (18)..(18): n is a, c, g, or t
  misc_feature (21)..(21): n is a, c, g, or t
  misc_feature (24)..(24): n is a, c, g, or t
  misc_feature (33)..(33): n is a, c, g, or t
  misc_feature (36)..(36): n is a, c, g, or t
  misc_feature (39)..(39): n is a, c, g, or t
  misc_feature (45)..(45): n is a, c, g, or t
  misc_feature (48)..(48): n is a, c, g, or t
  misc_feature (60)..(60): n is a, c, g, or t
  misc_feature (69)..(69): n is a, c, g, or t
  misc_feature (75)..(75): n is a, c, g, or t
  misc_feature (78)..(78): n is a, c, g, or t
  misc_feature (81)..(81): n is a, c, g, or t
  misc_feature (84)..(84): n is a, c, g, or t
  misc_feature (87)..(87): n is a, c, g, or t
  misc_feature (90)..(90): n is a, c, g, or t
  misc_feature (93)..(93): n is a, c, g, or t
  misc_feature (96)..(96): n is a, c, g, or t
  misc_feature (99)..(99): n is a, c, g, or t
  misc_feature (102)..(102): n is a, c, g, or t
  misc_feature (108)..(108): n is a, c, g, or t
  misc_feature (111)..(111): n is a, c, g, or t
  misc_feature (114)..(114): n is a, c, g, or t
  misc_feature (117)..(117): n is a, c, g, or t
  misc_feature (126)..(126): n is a, c, g, or t
  misc_feature (135)..(135): n is a, c, g, or t
  misc_feature (138)..(138): n is a, c, g, or t
  misc_feature (141)..(141): n is a, c, g, or t
  misc_feature (147)..(147): n is a, c, g, or t
  misc_feature (156)..(156): n is a, c, g, or t
  misc_feature (165)..(165): n is a, c, g, or t
  misc_feature (174)..(174): n is a, c, g, or t
  misc_feature (177)..(177): n is a, c, g, or t
  misc_feature (183)..(183): n is a, c, g, or t
  misc_feature (186)..(186): n is a, c, g, or t
  misc_feature (189)..(189): n is a, c, g, or t
  misc_feature (195)..(195): n is a, c, g, or t
  misc_feature (201)..(201): n is a, c, g, or t
  misc_feature (204)..(204): n is a, c, g, or t
  misc_feature (207)..(207): n is a, c, g, or t
  misc_feature (213)..(213): n is a, c, g, or t
  misc_feature (216)..(216): n is a, c, g, or t
  misc_feature (219)..(219): n is a, c, g, or t
  misc_feature (225)..(225): n is a, c, g, or t
  misc_feature (228)..(228): n is a, c, g, or t
  misc_feature (240)..(240): n is a, c, g, or t
  misc_feature (246)..(246): n is a, c, g, or t
  misc_feature (249)..(249): n is a, c, g, or t
  misc_feature (252)..(252): n is a, c, g, or t
  misc_feature (255)..(255): n is a, c, g, or t
  misc_feature (267)..(267): n is a, c, g, or t
  misc_feature (270)..(270): n is a, c, g, or t
  misc_feature (273)..(273): n is a, c, g, or t
  misc_feature (279)..(279): n is a, c, g, or t
  misc_feature (291)..(291): n is a, c, g, or t
  misc_feature (294)..(294): n is a, c, g, or t
  misc_feature (297)..(297): n is a, c, g, or t
  misc_feature (303)..(303): n is a, c, g, or t
  misc_feature (306)..(306): n is a, c, g, or t
  misc_feature (309)..(309): n is a, c, g, or t
  misc_feature (312)..(312): n is a, c, g, or t
  misc_feature (321)..(321): n is a, c, g, or t
  misc_feature (327)..(327): n is a, c, g, or t
  misc_feature (336)..(336): n is a, c, g, or t
  misc_feature (339)..(339): n is a, c, g, or t
  misc_feature (342)..(342): n is a, c, g, or t
  misc_feature (348)..(348): n is a, c, g, or t
  misc_feature (357)..(357): n is a, c, g, or t
  misc_feature (369)..(369): n is a, c, g, or t
  misc_feature (372)..(372): n is a, c, g, or t
  misc_feature (378)..(378): n is a, c, g, or t
  misc_feature (384)..(384): n is a, c, g, or t
  misc_feature (387)..(387): n is a, c, g, or t
  misc_feature (390)..(390): n is a, c, g, or t
  misc_feature (393)..(393): n is a, c, g, or t
  misc_feature (399)..(399): n is a, c, g, or t
gcngtnaarathwsnggngtnytnaargayggnacnggnaarccngtngaraaytgyacnathcarytnaargcnmgnmgnacnwsnwsnacngtngtngtnaayacngtngcnwsngaraayccngaygargcnggnmgntaywsnatggaygtngartayggncartaywsngtnathytnytngtngarggnttyccnccnwsncaygcnggnacnathacngtntaygargaywsncarccnggnacnytnaaygayttyytnggngcnatgwsngargaygaygtnmgnccngargcnytnmgnmgnttygarytnatggtngargargtngcnmgncaygcngargargcnaaraaraaygcnggngargcngaracnwsngcnmgnaaygcn

SEQ ID NO: 738 - DNA, 399 bp, Artificial Sequence
  PfN-CNA32
  misc_feature (3)..(3): n is a, c, g, or t
  misc_feature (6)..(6): n is a, c, g, or t
  misc_feature (15)..(15): n is a, c, g, or t
  misc_feature (18)..(18): n is a, c, g, or t
  misc_feature (21)..(21): n is a, c, g, or t
  misc_feature (24)..(24): n is a, c, g, or t
  misc_feature (33)..(33): n is a, c, g, or t
  misc_feature (36)..(36): n is a, c, g, or t
  misc_feature (39)..(39): n is a, c, g, or t
  misc_feature (45)..(45): n is a, c, g, or t
  misc_feature (48)..(48): n is a, c, g, or t
  misc_feature (60)..(60): n is a, c, g, or t
  misc_feature (69)..(69): n is a, c, g, or t
  misc_feature (75)..(75): n is a, c, g, or t
  misc_feature (78)..(78): n is a, c, g, or t
  misc_feature (81)..(81): n is a, c, g, or t
  misc_feature (84)..(84): n is a, c, g, or t
  misc_feature (87)..(87): n is a, c, g, or t
  misc_feature (90)..(90): n is a, c, g, or t
  misc_feature (93)..(93): n is a, c, g, or t
  misc_feature (96)..(96): n is a, c, g, or t
  misc_feature (99)..(99): n is a, c, g, or t
  misc_feature (102)..(102): n is a, c, g, or t
  misc_feature (108)..(108): n is a, c, g, or t
  misc_feature (111)..(111): n is a, c, g, or t
  misc_feature (114)..(114): n is a, c, g, or t
  misc_feature (117)..(117): n is a, c, g, or t
  misc_feature (126)..(126): n is a, c, g, or t
  misc_feature (135)..(135): n is a, c, g, or t
  misc_feature (138)..(138): n is a, c, g, or t
  misc_feature (141)..(141): n is a, c, g, or t
  misc_feature (147)..(147): n is a, c, g, or t
  misc_feature (156)..(156): n is a, c, g, or t
  misc_feature (165)..(165): n is a, c, g, or t
  misc_feature (174)..(174): n is a, c, g, or t
  misc_feature (177)..(177): n is a, c, g, or t
  misc_feature (183)..(183): n is a, c, g, or t
  misc_feature (186)..(186): n is a, c, g, or t
  misc_feature (189)..(189): n is a, c, g, or t
  misc_feature (195)..(195): n is a, c, g, or t
  misc_feature (201)..(201): n is a, c, g, or t
  misc_feature (204)..(204): n is a, c, g, or t
  misc_feature (207)..(207): n is a, c, g, or t
  misc_feature (213)..(213): n is a, c, g, or t
  misc_feature (216)..(216): n is a, c, g, or t
  misc_feature (219)..(219): n is a, c, g, or t
  misc_feature (225)..(225): n is a, c, g, or t
  misc_feature (228)..(228): n is a, c, g, or t
  misc_feature (240)..(240): n is a, c, g, or t
  misc_feature (246)..(246): n is a, c, g, or t
  misc_feature (249)..(249): n is a, c, g, or t
  misc_feature (252)..(252): n is a, c, g, or t
  misc_feature (255)..(255): n is a, c, g, or t
  misc_feature (267)..(267): n is a, c, g, or t
  misc_feature (270)..(270): n is a, c, g, or t
  misc_feature (273)..(273): n is a, c, g, or t
  misc_feature (279)..(279): n is a, c, g, or t
  misc_feature (291)..(291): n is a, c, g, or t
  misc_feature (294)..(294): n is a, c, g, or t
  misc_feature (297)..(297): n is a, c, g, or t
  misc_feature (303)..(303): n is a, c, g, or t
  misc_feature (306)..(306): n is a, c, g, or t
  misc_feature (309)..(309): n is a, c, g, or t
  misc_feature (312)..(312): n is a, c, g, or t
  misc_feature (321)..(321): n is a, c, g, or t
  misc_feature (327)..(327): n is a, c, g, or t
  misc_feature (336)..(336): n is a, c, g, or t
  misc_feature (339)..(339): n is a, c, g, or t
  misc_feature (342)..(342): n is a, c, g, or t
  misc_feature (348)..(348): n is a, c, g, or t
  misc_feature (357)..(357): n is a, c, g, or t
  misc_feature (369)..(369): n is a, c, g, or t
  misc_feature (372)..(372): n is a, c, g, or t
  misc_feature (378)..(378): n is a, c, g, or t
  misc_feature (384)..(384): n is a, c, g, or t
  misc_feature (387)..(387): n is a, c, g, or t
  misc_feature (390)..(390): n is a, c, g, or t
  misc_feature (393)..(393): n is a, c, g, or t
  misc_feature (399)..(399): n is a, c, g, or t
gcngtnaarathwsnggngtnytnaargayggnacnggnaarccngtngaraaytgyacnathcarytnaargcnmgnmgnacnwsnwsnacngtngtngtnaayacngtngcnwsngaraayccngaygargcnggnmgntaywsnatggaygtngartayggncartaymgngtnathytnytngtngarggnttyccnccnwsncaygcnggnacnathacngtntaygargaywsncarccnggnacnytnaaygayttyytnggngcnatgwsngargaygaygtnmgnccngargcnytnmgnmgnttygarytnatggtngargargtngcnmgncaygcngargargcnaaraaraaygcnggngargcngaracnwsngcnmgnaaygcn

SEQ ID NO: 739 - DNA, 399 bp, Artificial Sequence
  PfN-CNA33
  misc_feature (3)..(3): n is a, c, g, or t
  misc_feature (6)..(6): n is a, c, g, or t
  misc_feature (15)..(15): n is a, c, g, or t
  misc_feature (18)..(18): n is a, c, g, or t
  misc_feature (21)..(21): n is a, c, g, or t
  misc_feature (24)..(24): n is a, c, g, or t
  misc_feature (33)..(33): n is a, c, g, or t
  misc_feature (36)..(36): n is a, c, g, or t
  misc_feature (39)..(39): n is a, c, g, or t
  misc_feature (45)..(45): n is a, c, g, or t
  misc_feature (48)..(48): n is a, c, g, or t
  misc_feature (60)..(60): n is a, c, g, or t
  misc_feature (69)..(69): n is a, c, g, or t
  misc_feature (75)..(75): n is a, c, g, or t
  misc_feature (78)..(78): n is a, c, g, or t
  misc_feature (81)..(81): n is a, c, g, or t
  misc_feature (84)..(84): n is a, c, g, or t
  misc_feature (87)..(87): n is a, c, g, or t
  misc_feature (90)..(90): n is a, c, g, or t
  misc_feature (93)..(93): n is a, c, g, or t
  misc_feature (96)..(96): n is a, c, g, or t
  misc_feature (99)..(99): n is a, c, g, or t
  misc_feature (102)..(102): n is a, c, g, or t
  misc_feature (108)..(108): n is a, c, g, or t
  misc_feature (111)..(111): n is a, c, g, or t
  misc_feature (114)..(114): n is a, c, g, or t
  misc_feature (117)..(117): n is a, c, g, or t
  misc_feature (126)..(126): n is a, c, g, or t
  misc_feature (135)..(135): n is a, c, g, or t
  misc_feature (138)..(138): n is a, c, g, or t
  misc_feature (141)..(141): n is a, c, g, or t
  misc_feature (147)..(147): n is a, c, g, or t
  misc_feature (156)..(156): n is a, c, g, or t
  misc_feature (165)..(165): n is a, c, g, or t
  misc_feature (174)..(174): n is a, c, g, or t
  misc_feature (177)..(177): n is a, c, g, or t
  misc_feature (183)..(183): n is a, c, g, or t
  misc_feature (186)..(186): n is a, c, g, or t
  misc_feature (189)..(189): n is a, c, g, or t
  misc_feature (195)..(195): n is a, c, g, or t
  misc_feature (201)..(201): n is a, c, g, or t
  misc_feature (204)..(204): n is a, c, g, or t
  misc_feature (207)..(207): n is a, c, g, or t
  misc_feature (213)..(213): n is a, c, g, or t
  misc_feature (216)..(216): n is a, c, g, or t
  misc_feature (219)..(219): n is a, c, g, or t
  misc_feature (225)..(225): n is a, c, g, or t
  misc_feature (228)..(228): n is a, c, g, or t
  misc_feature (240)..(240): n is a, c, g, or t
  misc_feature (246)..(246): n is a, c, g, or t
  misc_feature (249)..(249): n is a, c, g, or t
  misc_feature (252)..(252): n is a, c, g, or t
  misc_feature (255)..(255): n is a, c, g, or t
  misc_feature (267)..(267): n is a, c, g, or t
  misc_feature (270)..(270): n is a, c, g, or t
  misc_feature (273)..(273): n is a, c, g, or t
  misc_feature (279)..(279): n is a, c, g, or t
  misc_feature (291)..(291): n is a, c, g, or t
  misc_feature (294)..(294): n is a, c, g, or t
  misc_feature (297)..(297): n is a, c, g, or t
  misc_feature (303)..(303): n is a, c, g, or t
  misc_feature (306)..(306): n is a, c, g, or t
  misc_feature (309)..(309): n is a, c, g, or t
  misc_feature (312)..(312): n is a, c, g, or t
  misc_feature (321)..(321): n is a, c, g, or t
  misc_feature (327)..(327): n is a, c, g, or t
  misc_feature (336)..(336): n is a, c, g, or t
  misc_feature (339)..(339): n is a, c, g, or t
  misc_feature (342)..(342): n is a, c, g, or t
  misc_feature (348)..(348): n is a, c, g, or t
  misc_feature (357)..(357): n is a, c, g, or t
  misc_feature (369)..(369): n is a, c, g, or t
  misc_feature (372)..(372): n is a, c, g, or t
  misc_feature (378)..(378): n is a, c, g, or t
  misc_feature (384)..(384): n is a, c, g, or t
  misc_feature (387)..(387): n is a, c, g, or t
  misc_feature (390)..(390): n is a, c, g, or t
  misc_feature (393)..(393): n is a, c, g, or t
  misc_feature (399)..(399): n is a, c, g, or t
gcngtnaarathwsnggngtnytnaargayggnacnggnaarccngtngaraaytgyacnathcarytnaargcnmgnmgnwsnwsnwsnacngtngtngtnaayacngtngcnwsngaraayccngaygargcnggnmgntaywsnatggaygtngartayggncartaywsngtnathytnytngtngarggnttyccnccnwsncaygcnggnacnathacngtntaygargaywsncarccnggnacnytnaaygayttyytnggngcnatgwsngargaygaygtnmgnccngargcnytnmgnmgnttygarytnatggtngargargtngcnmgncaygcngargargcnaaraaraaygcnggngargcngaracnwsngcnmgnaaygcn

SEQ ID NO: 740 - DNA, 399 bp, Artificial Sequence
  PfN-CNA34
  misc_feature (3)..(3): n is a, c, g, or t
  misc_feature (6)..(6): n is a, c, g, or t
  misc_feature (15)..(15): n is a, c, g, or t
  misc_feature (18)..(18): n is a, c, g, or t
  misc_feature (21)..(21): n is a, c, g, or t
  misc_feature (24)..(24): n is a, c, g, or t
  misc_feature (33)..(33): n is a, c, g, or t
  misc_feature (36)..(36): n is a, c, g, or t
  misc_feature (39)..(39): n is a, c, g, or t
  misc_feature (45)..(45): n is a, c, g, or t
  misc_feature (48)..(48): n is a, c, g, or t
  misc_feature (60)..(60): n is a, c, g, or t
  misc_feature (69)..(69): n is a, c, g, or t
  misc_feature (75)..(75): n is a, c, g, or t
  misc_feature (78)..(78): n is a, c, g, or t
  misc_feature (81)..(81): n is a, c, g, or t
  misc_feature (84)..(84): n is a, c, g, or t
  misc_feature (87)..(87): n is a, c, g, or t
  misc_feature (90)..(90): n is a, c, g, or t
  misc_feature (93)..(93): n is a, c, g, or t
  misc_feature (96)..(96): n is a, c, g, or t
  misc_feature (99)..(99): n is a, c, g, or t
  misc_feature (102)..(102): n is a, c, g, or t
  misc_feature (108)..(108): n is a, c, g, or t
  misc_feature (111)..(111): n is a, c, g, or t
  misc_feature (114)..(114): n is a, c, g, or t
  misc_feature (117)..(117): n is a, c, g, or t
  misc_feature (126)..(126): n is a, c, g, or t
  misc_feature (135)..(135): n is a, c, g, or t
  misc_feature (138)..(138): n is a, c, g, or t
  misc_feature (141)..(141): n is a, c, g, or t
  misc_feature (147)..(147): n is a, c, g, or t
  misc_feature (156)..(156): n is a, c, g, or t
  misc_feature (165)..(165): n is a, c, g, or t
  misc_feature (174)..(174): n is a, c, g, or t
  misc_feature (177)..(177): n is a, c, g, or t
  misc_feature (183)..(183): n is a, c, g, or t
  misc_feature (186)..(186): n is a, c, g, or t
  misc_feature (189)..(189): n is a, c, g, or t
  misc_feature (195)..(195): n is a, c, g, or t
  misc_feature (201)..(201): n is a, c, g, or t
  misc_feature (204)..(204): n is a, c, g, or t
  misc_feature (207)..(207): n is a, c, g, or t
  misc_feature (213)..(213): n is a, c, g, or t
  misc_feature (216)..(216): n is a, c, g, or t
  misc_feature (219)..(219): n is a, c, g, or t
  misc_feature (225)..(225): n is a, c, g, or t
  misc_feature (228)..(228): n is a, c, g, or t
  misc_feature (240)..(240): n is a, c, g, or t
  misc_feature (246)..(246): n is a, c, g, or t
  misc_feature (249)..(249): n is a, c, g, or t
  misc_feature (252)..(252): n is a, c, g, or t
  misc_feature (255)..(255): n is a, c, g, or t
  misc_feature (267)..(267): n is a, c, g, or t
  misc_feature (270)..(270): n is a, c, g, or t
  misc_feature (273)..(273): n is a, c, g, or t
  misc_feature (279)..(279): n is a, c, g, or t
  misc_feature (291)..(291): n is a, c, g, or t
  misc_feature (294)..(294): n is a, c, g, or t
  misc_feature (297)..(297): n is a, c, g, or t
  misc_feature (303)..(303): n is a, c, g, or t
  misc_feature (306)..(306): n is a, c, g, or t
  misc_feature (309)..(309): n is a, c, g, or t
  misc_feature (312)..(312): n is a, c, g, or t
  misc_feature (321)..(321): n is a, c, g, or t
  misc_feature (327)..(327): n is a, c, g, or t
  misc_feature (336)..(336): n is a, c, g, or t
  misc_feature (339)..(339): n is a, c, g, or t
  misc_feature (342)..(342): n is a, c, g, or t
  misc_feature (348)..(348): n is a, c, g, or t
  misc_feature (357)..(357): n is a, c, g, or t
  misc_feature (369)..(369): n is a, c, g, or t
  misc_feature (372)..(372): n is a, c, g, or t
  misc_feature (378)..(378): n is a, c, g, or t
  misc_feature (384)..(384): n is a, c, g, or t
  misc_feature (387)..(387): n is a, c, g, or t
  misc_feature (390)..(390): n is a, c, g, or t
  misc_feature (393)..(393): n is a, c, g, or t
  misc_feature (399)..(399): n is a, c, g, or t
gcngtnaarathwsnggngtnytnaargayggnacnggnaarccngtngaraaytgyacnathcarytnaargcnmgnmgnacnwsnwsnacngtngtngtnaayacngtngcnwsngaraayccngaygargcnggnmgntaywsnatggaygtngartayggncartaywsngtnathytnytngtngarggnttyccnccnwsncaygcnggnacnathacngtntaygargaywsncarccnggnacnytnaaygayttyytnggngcnatgacngargaygaygcnmgnccngargcnytnmgnmgnttygarytnatggtngargargtngcnmgncaygcngargargcnaaraaraaygcnggngargcngaracnwsngcnmgnaaygcn

SEQ ID NO: 741 - DNA, 399 bp, Artificial Sequence
  PfN-CNA35
  misc_feature (3)..(3): n is a, c, g, or t
  misc_feature (6)..(6): n is a, c, g, or t
  misc_feature (15)..(15): n is a, c, g, or t
  misc_feature (18)..(18): n is a, c, g, or t
  misc_feature (21)..(21): n is a, c, g, or t
  misc_feature (24)..(24): n is a, c, g, or t
  misc_feature (33)..(33): n is a, c, g, or t
  misc_feature (36)..(36): n is a, c, g, or t
  misc_feature (39)..(39): n is a, c, g, or t
  misc_feature (45)..(45): n is a, c, g, or t
  misc_feature (48)..(48): n is a, c, g, or t
  misc_feature (60)..(60): n is a, c, g, or t
  misc_feature (69)..(69): n is a, c, g, or t
  misc_feature (75)..(75): n is a, c, g, or t
  misc_feature (78)..(78): n is a, c, g, or t
  misc_feature (81)..(81): n is a, c, g, or t
  misc_feature (84)..(84): n is a, c, g, or t
  misc_feature (87)..(87): n is a, c, g, or t
  misc_feature (90)..(90): n is a, c, g, or t
  misc_feature (93)..(93): n is a, c, g, or t
  misc_feature (96)..(96): n is a, c, g, or t
  misc_feature (99)..(99): n is a, c, g, or t
  misc_feature (102)..(102): n is a, c, g, or t
  misc_feature (108)..(108): n is a, c, g, or t
  misc_feature (111)..(111): n is a, c, g, or t
  misc_feature (114)..(114): n is a, c, g, or t
  misc_feature (117)..(117): n is a, c, g, or t
  misc_feature (126)..(126): n is a, c, g, or t
  misc_feature (135)..(135): n is a, c, g, or t
  misc_feature (138)..(138): n is a, c, g, or t
  misc_feature (141)..(141): n is a, c, g, or t
  misc_feature (147)..(147): n is a, c, g, or t
  misc_feature (156)..(156): n is a, c, g, or t
  misc_feature (165)..(165): n is a, c, g, or t
  misc_feature (174)..(174): n is a, c, g, or t
  misc_feature (177)..(177): n is a, c, g, or t
  misc_feature (183)..(183): n is a, c, g, or t
  misc_feature (186)..(186): n is a, c, g, or t
  misc_feature (189)..(189): n is a, c, g, or t
  misc_feature (195)..(195): n is a, c, g, or t
  misc_feature (201)..(201): n is a, c, g, or t
  misc_feature (204)..(204): n is a, c, g, or t
  misc_feature (207)..(207): n is a, c, g, or t
  misc_feature (213)..(213): n is a, c, g, or t
  misc_feature (216)..(216): n is a, c, g, or t
  misc_feature (219)..(219): n is a, c, g, or t
  misc_feature (225)..(225): n is a, c, g, or t
  misc_feature (228)..(228): n is a, c, g, or t
  misc_feature (240)..(240): n is a, c, g, or t
  misc_feature (243)..(243): n is a, c, g, or t
  misc_feature (246)..(246): n is a, c, g, or t
  misc_feature (249)..(249): n is a, c, g, or t
  misc_feature (252)..(252): n is a, c, g, or t
  misc_feature (255)..(255): n is a, c, g, or t
  misc_feature (267)..(267): n is a, c, g, or t
  misc_feature (270)..(270): n is a, c, g, or t
  misc_feature (273)..(273): n is a, c, g, or t
  misc_feature (279)..(279): n is a, c, g, or t
  misc_feature (285)..(285): n is a, c, g, or t
  misc_feature (291)..(291): n is a, c, g, or t
  misc_feature (294)..(294): n is a, c, g, or t
  misc_feature (297)..(297): n is a, c, g, or t
  misc_feature (303)..(303): n is a, c, g, or t
  misc_feature (306)..(306): n is a, c, g, or t
  misc_feature (309)..(309): n is a, c, g, or t
  misc_feature (312)..(312): n is a, c, g, or t
  misc_feature (321)..(321): n is a, c, g, or t
  misc_feature (327)..(327): n is a, c, g, or t
  misc_feature (336)..(336): n is a, c, g, or t
  misc_feature (339)..(339): n is a, c, g, or t
  misc_feature (342)..(342): n is a, c, g, or t
  misc_feature (348)..(348): n is a, c, g, or t
  misc_feature (357)..(357): n is a, c, g, or t
  misc_feature (369)..(369): n is a, c, g, or t
  misc_feature (372)..(372): n is a, c, g, or t
  misc_feature (378)..(378): n is a, c, g, or t
  misc_feature (384)..(384): n is a, c, g, or t
  misc_feature (387)..(387): n is a, c, g, or t
  misc_feature (390)..(390): n is a, c, g, or t
  misc_feature (393)..(393): n is a, c, g, or t
  misc_feature (399)..(399): n is a, c, g, or t
gcngtnaarathwsnggngtnytnaargayggnacnggnaarccngtngaraaytgyacnathcarytnaargcnmgnmgnacnwsnwsnacngtngtngtnaayacngtngcnwsngaraayccngaygargcnggnmgntaywsnatggaygtngartayggncartaywsngtnathytnytngtngarggnttyccnccnwsncaygcnggnacnathacngtntaygargaywsnmgnccnggnacnytnaaygayttyytnggngcnatgacngarggngaygtnmgnccngargcnytnmgnmgnttygarytnatggtngargargtngcnmgncaygcngargargcnaaraaraaygcnggngargcngaracnwsngcnmgnaaygcn

SEQ ID NO: 742 - DNA, 399 bp, Artificial Sequence
  PfN-CNA36
  misc_feature (3)..(3): n is a, c, g, or t
  misc_feature (6)..(6): n is a, c, g, or t
  misc_feature (15)..(15): n is a, c, g, or t
  misc_feature (18)..(18): n is a, c, g, or t
  misc_feature (21)..(21): n is a, c, g, or t
  misc_feature (24)..(24): n is a, c, g, or t
  misc_feature (33)..(33): n is a, c, g, or t
  misc_feature (36)..(36): n is a, c, g, or t
  misc_feature (39)..(39): n is a, c, g, or t
  misc_feature (45)..(45): n is a, c, g, or t
  misc_feature (48)..(48): n is a, c, g, or t
  misc_feature (60)..(60): n is a, c, g, or t
  misc_feature (69)..(69): n is a, c, g, or t
  misc_feature (75)..(75): n is a, c, g, or t
  misc_feature (78)..(78): n is a, c, g, or t
  misc_feature (81)..(81): n is a, c, g, or t
  misc_feature (84)..(84): n is a, c, g, or t
  misc_feature (87)..(87): n is a, c, g, or t
  misc_feature (90)..(90): n is a, c, g, or t
  misc_feature (93)..(93): n is a, c, g, or t
  misc_feature (96)..(96): n is a, c, g, or t
  misc_feature (99)..(99): n is a, c, g, or t
  misc_feature (102)..(102): n is a, c, g, or t
  misc_feature (108)..(108): n is a, c, g, or t
  misc_feature (111)..(111): n is a, c, g, or t
  misc_feature (114)..(114): n is a, c, g, or t
  misc_feature (117)..(117): n is a, c, g, or t
  misc_feature (126)..(126): n is a, c, g, or t
  misc_feature (135)..(135): n is a, c, g, or t
  misc_feature (138)..(138): n is a, c, g, or t
  misc_feature (141)..(141): n is a, c, g, or t
  misc_feature (147)..(147): n is a, c, g, or t
  misc_feature (156)..(156): n is a, c, g, or t
  misc_feature (165)..(165): n is a, c, g, or t
  misc_feature (174)..(174): n is a, c, g, or t
  misc_feature (177)..(177): n is a, c, g, or t
  misc_feature (183)..(183): n is a, c, g, or t
  misc_feature (186)..(186): n is a, c, g, or t
  misc_feature (189)..(189): n is a, c, g, or t
  misc_feature (195)..(195): n is a, c, g, or t
  misc_feature (201)..(201): n is a, c, g, or t
  misc_feature (204)..(204): n is a, c, g, or t
  misc_feature (207)..(207): n is a, c, g, or t
  misc_feature (213)..(213): n is a, c, g, or t
  misc_feature (216)..(216): n is a, c, g, or t
  misc_feature (219)..(219): n is a, c, g, or t
  misc_feature (225)..(225): n is a, c, g, or t
  misc_feature (228)..(228): n is a, c, g, or t
  misc_feature (240)..(240): n is a, c, g, or t
  misc_feature (246)..(246): n is a, c, g, or t
  misc_feature (249)..(249): n is a, c, g, or t
  misc_feature (252)..(252): n is a, c, g, or t
  misc_feature (255)..(255): n is a, c, g, or t
  misc_feature (267)..(267): n is a, c, g, or t
  misc_feature (270)..(270): n is a, c, g, or t
  misc_feature (273)..(273): n is a, c, g, or t
  misc_feature (279)..(279): n is a, c, g, or t
  misc_feature (291)..(291): n is a, c, g, or t
  misc_feature (294)..(294): n is a, c, g, or t
  misc_feature (297)..(297): n is a, c, g, or t
  misc_feature (303)..(303): n is a, c, g, or t
  misc_feature (306)..(306): n is a, c, g, or t
  misc_feature (309)..(309): n is a, c, g, or t
  misc_feature (312)..(312): n is a, c, g, or t
  misc_feature (321)..(321): n is a, c, g, or t
  misc_feature (327)..(327): n is a, c, g, or t
  misc_feature (336)..(336): n is a, c, g, or t
  misc_feature (339)..(339): n is a, c, g, or t
  misc_feature (342)..(342): n is a, c, g, or t
  misc_feature (348)..(348): n is a, c, g, or t
  misc_feature (357)..(357): n is a, c, g, or t
  misc_feature (369)..(369): n is a, c, g, or t
  misc_feature (372)..(372): n is a, c, g, or t
  misc_feature (378)..(378): n is a, c, g, or t
  misc_feature (384)..(384): n is a, c, g, or t
  misc_feature (387)..(387): n is a, c, g, or t
  misc_feature (390)..(390): n is a, c, g, or t
  misc_feature (393)..(393): n is a, c, g, or t
  misc_feature (399)..(399): n is a, c, g, or t
gcngtnaarathwsnggngtnytnaargayggnacnggnaarccngtngaraaytgyacnathcarytnaargcnmgnmgnacnwsnwsnacngtngtngtnaayacngtngcnwsngaraayccngaygargcnggnmgntaywsnatggaygtngartayggncartaywsngtnathytnytngtngarggnttyccnccnwsncaygcnggnacnathacngtntaygargaywsncarccnggnacnytnaaygayttyytnggngcnatgwsngargaygaygtnmgnccngargcnytnmgnmgnttygarytnatggtngargargcngcnmgncaygcngargargcnaaraaraaygcnggngargcngaracnwsngcnmgnaaygcn

SEQ ID NO: 743 - DNA, 399 bp, Artificial Sequence
  PfN-CNA37
  misc_feature (3)..(3): n is a, c, g, or t
  misc_feature (6)..(6): n is a, c, g, or t
  misc_feature (15)..(15): n is a, c, g, or t
  misc_feature (18)..(18): n is a, c, g, or t
  misc_feature (21)..(21): n is a, c, g, or t
  misc_feature (24)..(24): n is a, c, g, or t
  misc_feature (33)..(33): n is a, c, g, or t
  misc_feature (36)..(36): n is a, c, g, or t
  misc_feature (39)..(39): n is a, c, g, or t
  misc_feature (45)..(45): n is a, c, g, or t
  misc_feature (48)..(48): n is a, c, g, or t
  misc_feature (60)..(60): n is a, c, g, or t
  misc_feature (69)..(69): n is a, c, g, or t
  misc_feature (75)..(75): n is a, c, g, or t
  misc_feature (78)..(78): n is a, c, g, or t
  misc_feature (81)..(81): n is a, c, g, or t
  misc_feature (84)..(84): n is a, c, g, or t
  misc_feature (87)..(87): n is a, c, g, or t
  misc_feature (90)..(90): n is a, c, g, or t
  misc_feature (93)..(93): n is a, c, g, or t
  misc_feature (96)..(96): n is a, c, g, or t
  misc_feature (99)..(99): n is a, c, g, or t
  misc_feature (102)..(102): n is a, c, g, or t
  misc_feature (108)..(108): n is a, c, g, or t
  misc_feature (111)..(111): n is a, c, g, or t
  misc_feature (114)..(114): n is a, c, g, or t
  misc_feature (117)..(117): n is a, c, g, or t
  misc_feature (126)..(126): n is a, c, g, or t
  misc_feature (135)..(135): n is a, c, g, or t
  misc_feature (138)..(138): n is a, c, g, or t
  misc_feature (141)..(141): n is a, c, g, or t
  misc_feature (147)..(147): n is a, c, g, or t
  misc_feature (156)..(156): n is a, c, g, or t
  misc_feature (165)..(165): n is a, c, g, or t
  misc_feature (174)..(174): n is a, c, g, or t
  misc_feature (177)..(177): n is a, c, g, or t
  misc_feature (183)..(183): n is a, c, g, or t
  misc_feature (186)..(186): n is a, c, g, or t
  misc_feature (189)..(189): n is a, c, g, or t
  misc_feature (195)..(195): n is a, c, g, or t
  misc_feature (201)..(201): n is a, c, g, or t
  misc_feature (204)..(204): n is a, c, g, or t
  misc_feature (207)..(207): n is a, c, g, or t
  misc_feature (213)..(213): n is a, c, g, or t
  misc_feature (216)..(216): n is a, c, g, or t
  misc_feature (219)..(219): n is a, c, g, or t
  misc_feature (225)..(225): n is a, c, g, or t
  misc_feature (228)..(228): n is a, c, g, or t
  misc_feature (240)..(240): n is a, c, g, or t
  misc_feature (246)..(246): n is a, c, g, or t
  misc_feature (249)..(249): n is a, c, g, or t
  misc_feature (252)..(252): n is a, c, g, or t
  misc_feature (255)..(255): n is a, c, g, or t
  misc_feature (267)..(267): n is a, c, g, or t
  misc_feature (270)..(270): n is a, c, g, or t
  misc_feature (273)..(273): n is a, c, g, or t
  misc_feature (279)..(279): n is a, c, g, or t
  misc_feature (291)..(291): n is a, c, g, or t
  misc_feature (294)..(294): n is a, c, g, or t
  misc_feature (297)..(297): n is a, c, g, or t
  misc_feature (303)..(303): n is a, c, g, or t
  misc_feature (306)..(306): n is a, c, g, or t
  misc_feature (309)..(309): n is a, c, g, or t
  misc_feature (312)..(312): n is a, c, g, or t
  misc_feature (321)..(321): n is a, c, g, or t
  misc_feature (327)..(327): n is a, c, g, or t
  misc_feature (336)..(336): n is a, c, g, or t
  misc_feature (339)..(339): n is a, c, g, or t
  misc_feature (342)..(342): n is a, c, g, or t
  misc_feature (348)..(348): n is a, c, g, or t
  misc_feature (357)..(357): n is a, c, g, or t
  misc_feature (369)..(369): n is a, c, g, or t
  misc_feature (372)..(372): n is a, c, g, or t
  misc_feature (378)..(378): n is a, c, g, or t
  misc_feature (384)..(384): n is a, c, g, or t
  misc_feature (387)..(387): n is a, c, g, or t
  misc_feature (390)..(390): n is a, c, g, or t
  misc_feature (393)..(393): n is a, c, g, or t
  misc_feature (399)..(399): n is a, c, g, or t
gcngtnaarathwsnggngtnytnaargayggnacnggnaarccngtngaraaytgyacnathcarytnaargcnmgnmgnacnwsnwsnacngtngtngtnaayacngtngcnwsngaraayccngaygargcnggnmgntayacnatggaygtngartayggncartaywsngtnathytnytngtngarggnttyccnccnwsncaygcnggnacnathacngtntaygargaywsncarccnggnacnytnaaygayttyytnggngcnatgwsngargaygaygtnmgnccngargcnytnmgnmgnttygarytnatggtngargargcngcnmgncaygcngargargcnaaraaraaygcnggngargcngaracnwsngcnmgnaaygcn

SEQ ID NO: 744 - DNA, 399 bp, Artificial Sequence
  PfN-CNA38
  misc_feature (3)..(3): n is a, c, g, or t
  misc_feature (6)..(6): n is a, c, g, or t
  misc_feature (15)..(15): n is a, c, g, or t
  misc_feature (18)..(18): n is a, c, g, or t
  misc_feature (21)..(21): n is a, c, g, or t
  misc_feature (24)..(24): n is a, c, g, or t
  misc_feature (33)..(33): n is a, c, g, or t
  misc_feature (36)..(36): n is a, c, g, or t
  misc_feature (39)..(39): n is a, c, g, or t
  misc_feature (45)..(45): n is a, c, g, or t
  misc_feature (48)..(48): n is a, c, g, or t
  misc_feature (60)..(60): n is a, c, g, or t
  misc_feature (69)..(69): n is a, c, g, or t
  misc_feature (75)..(75): n is a, c, g, or t
  misc_feature (78)..(78): n is a, c, g, or t
  misc_feature (81)..(81): n is a, c, g, or t
  misc_feature (84)..(84): n is a, c, g, or t
  misc_feature (87)..(87): n is a, c, g, or t
  misc_feature (90)..(90): n is a, c, g, or t
  misc_feature (93)..(93): n is a, c, g, or t
  misc_feature (96)..(96): n is a, c, g, or t
  misc_feature (99)..(99): n is a, c, g, or t
  misc_feature (102)..(102): n is a, c, g, or t
  misc_feature (108)..(108): n is a, c, g, or t
  misc_feature (111)..(111): n is a, c, g, or t
  misc_feature (114)..(114): n is a, c, g, or t
  misc_feature (117)..(117): n is a, c, g, or t
  misc_feature (126)..(126): n is a, c, g, or t
  misc_feature (135)..(135): n is a, c, g, or t
  misc_feature (138)..(138): n is a, c, g, or t
  misc_feature (141)..(141): n is a, c, g, or t
  misc_feature (147)..(147): n is a, c, g, or t
  misc_feature (156)..(156): n is a, c, g, or t
  misc_feature (165)..(165): n is a, c, g, or t
  misc_feature (174)..(174): n is a, c, g, or t
  misc_feature (177)..(177): n is a, c, g, or t
  misc_feature (183)..(183): n is a, c, g, or t
  misc_feature (186)..(186): n is a, c, g, or t
  misc_feature (189)..(189): n is a, c, g, or t
  misc_feature (195)..(195): n is a, c, g, or t
  misc_feature (201)..(201): n is a, c, g, or t
  misc_feature (204)..(204): n is a, c, g, or t
  misc_feature (207)..(207): n is a, c, g, or t
  misc_feature (213)..(213): n is a, c, g, or t
  misc_feature (216)..(216): n is a, c, g, or t
  misc_feature (219)..(219): n is a, c, g, or t
  misc_feature (225)..(225): n is a, c, g, or t
  misc_feature (228)..(228): n is a, c, g, or t
  misc_feature (240)..(240): n is a, c, g, or t
  misc_feature (246)..(246): n is a, c, g, or t
  misc_feature (249)..(249): n is a, c, g, or t
  misc_feature (252)..(252): n is a, c, g, or t
  misc_feature (255)..(255): n is a, c, g, or t
  misc_feature (267)..(267): n is a, c, g, or t
  misc_feature (270)..(270): n is a, c, g, or t
  misc_feature (273)..(273): n is a, c, g, or t
  misc_feature (279)..(279): n is a, c, g, or t
  misc_feature (291)..(291): n is a, c, g, or t
  misc_feature (294)..(294): n is a, c, g, or t
  misc_feature (297)..(297): n is a, c, g, or t
  misc_feature (303)..(303): n is a, c, g, or t
  misc_feature (306)..(306): n is a, c, g, or t
  misc_feature (309)..(309): n is a, c, g, or t
  misc_feature (312)..(312): n is a, c, g, or t
  misc_feature (321)..(321): n is a, c, g, or t
  misc_feature (327)..(327): n is a, c, g, or t
  misc_feature (336)..(336): n is a, c, g, or t
  misc_feature (339)..(339): n is a, c, g, or t
  misc_feature (342)..(342): n is a, c, g, or t
  misc_feature (348)..(348): n is a, c, g, or t
  misc_feature (357)..(357): n is a, c, g, or t
  misc_feature (369)..(369): n is a, c, g, or t
  misc_feature (372)..(372): n is a, c, g, or t
  misc_feature (378)..(378): n is a, c, g, or t
  misc_feature (384)..(384): n is a, c, g, or t
  misc_feature (387)..(387): n is a, c, g, or t
  misc_feature (390)..(390): n is a, c, g, or t
  misc_feature (393)..(393): n is a, c, g, or t
  misc_feature (399)..(399): n is a, c, g, or t
gcngtnaarathwsnggngtnytnaargayggnacnggnaarccngtngaraaytgyacnathcarytnaargcnmgnmgnacnwsnwsnacngtngtngtnaayacngtngcnwsngaraayccngaygargcnggnmgntaywsnatggaygtngartayggncartaywsngtnathytnytngtngarggnttyccnccnwsncaygcnggnacnathacngtntaygargaywsncarccnggnacnytnaaygayttyytnggngcnatgwsngargaygaygtnmgnccngargcnytnmgnmgnttygarytnatgytngargargcngcnmgncaygcngargargcnaaraaraaygcnggngargcngaracnwsngcnmgnaaygcn

SEQ ID NO: 745 - DNA, 414 bp, Artificial Sequence
  PfN-CNA39
  misc_feature (3)..(3): n is a, c, g, or t
  misc_feature (6)..(6): n is a, c, g, or t
  misc_feature (15)..(15): n is a, c, g, or t
  misc_feature (18)..(18): n is a, c, g, or t
  misc_feature (21)..(21): n is a, c, g, or t
  misc_feature (24)..(24): n is a, c, g, or t
  misc_feature (33)..(33): n is a, c, g, or t
  misc_feature (36)..(36): n is a, c, g, or t
  misc_feature (39)..(39): n is a, c, g, or t
  misc_feature (45)..(45): n is a, c, g, or t
  misc_feature (48)..(48): n is a, c, g, or t
  misc_feature (60)..(60): n is a, c, g, or t
  misc_feature (69)..(69): n is a, c, g, or t
  misc_feature (75)..(75): n is a, c, g, or t
  misc_feature (78)..(78): n is a, c, g, or t
  misc_feature (81)..(81): n is a, c, g, or t
  misc_feature (84)..(84): n is a, c, g, or t
  misc_feature (87)..(87): n is a, c, g, or t
  misc_feature (90)..(90): n is a, c, g, or t
  misc_feature (93)..(93): n is a, c, g, or t
  misc_feature (96)..(96): n is a, c, g, or t
  misc_feature (99)..(99): n is a, c, g, or t
  misc_feature (102)..(102): n is a, c, g, or t
  misc_feature (108)..(108): n is a, c, g, or t
  misc_feature (111)..(111): n is a, c, g, or t
  misc_feature (114)..(114): n is a, c, g, or t
  misc_feature (117)..(117): n is a, c, g, or t
  misc_feature (123)..(123): n is a, c, g, or t
  misc_feature (126)..(126): n is a, c, g, or t
  misc_feature (129)..(129): n is a, c, g, or t
  misc_feature (132)..(132): n is a, c, g, or t
  misc_feature (141)..(141): n is a, c, g, or t
  misc_feature (150)..(150): n is a, c, g, or t
  misc_feature (153)..(153): n is a, c, g, or t
  misc_feature (156)..(156): n is a, c, g, or t
  misc_feature (162)..(162): n is a, c, g, or t
  misc_feature (171)..(171): n is a, c, g, or t
  misc_feature (180)..(180): n is a, c, g, or t
  misc_feature (189)..(189): n is a, c, g, or t
  misc_feature (192)..(192): n is a, c, g, or t
  misc_feature (198)..(198): n is a, c, g, or t
  misc_feature (201)..(201): n is a, c, g, or t
  misc_feature (204)..(204): n is a, c, g, or t
  misc_feature (210)..(210): n is a, c, g, or t
  misc_feature (216)..(216): n is a, c, g, or t
  misc_feature (219)..(219): n is a, c, g, or t
  misc_feature (222)..(222): n is a, c, g, or t
  misc_feature (228)..(228): n is a, c, g, or t
  misc_feature (231)..(231): n is a, c, g, or t
  misc_feature (240)..(240): n is a, c, g, or t
  misc_feature (243)..(243): n is a, c, g, or t
  misc_feature (255)..(255): n is a, c, g, or t
  misc_feature (261)..(261): n is a, c, g, or t
  misc_feature (264)..(264): n is a, c, g, or t
  misc_feature (267)..(267): n is a, c, g, or t
  misc_feature (270)..(270): n is a, c, g, or t
  misc_feature (282)..(282): n is a, c, g, or t
  misc_feature (285)..(285): n is a, c, g, or t
  misc_feature (288)..(288): n is a, c, g, or t
  misc_feature (294)..(294): n is a, c, g, or t
  misc_feature (306)..(306): n is a, c, g, or t
  misc_feature (309)..(309): n is a, c, g, or t
  misc_feature (312)..(312): n is a, c, g, or t
  misc_feature (318)..(318): n is a, c, g, or t
  misc_feature (321)..(321): n is a, c, g, or t
  misc_feature (324)..(324): n is a, c, g, or t
  misc_feature (327)..(327): n is a, c, g, or t
  misc_feature (336)..(336): n is a, c, g, or t
  misc_feature (342)..(342): n is a, c, g, or t
  misc_feature (351)..(351): n is a, c, g, or t
  misc_feature (354)..(354): n is a, c, g, or t
  misc_feature (357)..(357): n is a, c, g, or t
  misc_feature (363)..(363): n is a, c, g, or t
  misc_feature (372)..(372): n is a, c, g, or t
  misc_feature (384)..(384): n is a, c, g, or t
  misc_feature (387)..(387): n is a, c, g, or t
  misc_feature (393)..(393): n is a, c, g, or t
  misc_feature (399)..(399): n is a, c, g, or t
  misc_feature (402)..(402): n is a, c, g, or t
  misc_feature (405)..(405): n is a, c, g, or t
  misc_feature (408)..(408): n is a, c, g, or t
  misc_feature (414)..(414): n is a, c, g, or t
gcngtnaarathwsnggngtnytnaargayggnacnggnaarccngtngaraaytgyacnathcarytnaargcnmgnmgnacnwsnwsnacngtngtngtnaayacngtngtngtnaayacngtngcnwsngaraayccngaygargcnggnmgntaywsnatggaygtngartayggncartaywsngtnathytnytngtngarggnttyccnccnwsncaygcnggnathathacngtntaygargaywsncarccnggnacnytnaaygayttyytnggngcnatgwsngargaygaygtnmgnccngargcnytnmgnmgnttygarytnatggtngargargcngcnmgncaygcngargargcnaaraaraaygcnggngargcngaracnwsngcnmgnaaygcn

SEQ ID NO: 746 - DNA, 399 bp, Artificial Sequence
  PfN-CNA40
  misc_feature (3)..(3): n is a, c, g, or t
  misc_feature (6)..(6): n is a, c, g, or t
  misc_feature (15)..(15): n is a, c, g, or t
  misc_feature (18)..(18): n is a, c, g, or t
  misc_feature (21)..(21): n is a, c, g, or t
  misc_feature (24)..(24): n is a, c, g, or t
  misc_feature (33)..(33): n is a, c, g, or t
  misc_feature (36)..(36): n is a, c, g, or t
  misc_feature (39)..(39): n is a, c, g, or t
  misc_feature (45)..(45): n is a, c, g, or t
  misc_feature (48)..(48): n is a, c, g, or t
  misc_feature (60)..(60): n is a, c, g, or t
  misc_feature (69)..(69): n is a, c, g, or t
  misc_feature (75)..(75): n is a, c, g, or t
  misc_feature (78)..(78): n is a, c, g, or t
  misc_feature (81)..(81): n is a, c, g, or t
  misc_feature (84)..(84): n is a, c, g, or t
  misc_feature (87)..(87): n is a, c, g, or t
  misc_feature (90)..(90): n is a, c, g, or t
  misc_feature (93)..(93): n is a, c, g, or t
  misc_feature (96)..(96): n is a, c, g, or t
  misc_feature (99)..(99): n is a, c, g, or t
  misc_feature (102)..(102): n is a, c, g, or t
  misc_feature (108)..(108): n is a, c, g, or t
  misc_feature (111)..(111): n is a, c, g, or t
  misc_feature (114)..(114): n is a, c, g, or t
  misc_feature (117)..(117): n is a, c, g, or t
  misc_feature (126)..(126): n is a, c, g, or t
  misc_feature (135)..(135): n is a, c, g, or t
  misc_feature (138)..(138): n is a, c, g, or t
  misc_feature (141)..(141): n is a, c, g, or t
  misc_feature (147)..(147): n is a, c, g, or t
  misc_feature (156)..(156): n is a, c, g, or t
  misc_feature (165)..(165): n is a, c, g, or t
  misc_feature (174)..(174): n is a, c, g, or t
  misc_feature (177)..(177): n is a, c, g, or t
  misc_feature (183)..(183): n is a, c, g, or t
  misc_feature (186)..(186): n is a, c, g, or t
  misc_feature (189)..(189): n is a, c, g, or t
  misc_feature (195)..(195): n is a, c, g, or t
  misc_feature (201)..(201): n is a, c, g, or t
  misc_feature (204)..(204): n is a, c, g, or t
  misc_feature (207)..(207): n is a, c, g, or t
  misc_feature (213)..(213): n is a, c, g, or t
  misc_feature (216)..(216): n is a, c, g, or t
  misc_feature (219)..(219): n is a, c, g, or t
  misc_feature (225)..(225): n is a, c, g, or t
  misc_feature (228)..(228): n is a, c, g, or t
  misc_feature (240)..(240): n is a, c, g, or t
  misc_feature (243)..(243): n is a, c, g, or t
  misc_feature (246)..(246): n is a, c, g, or t
  misc_feature (249)..(249): n is a, c, g, or t
  misc_feature (252)..(252): n is a, c, g, or t
  misc_feature (255)..(255): n is a, c, g, or t
  misc_feature (267)..(267): n is a, c, g, or t
  misc_feature (270)..(270): n is a, c, g, or t
  misc_feature (273)..(273): n is a, c, g, or t
  misc_feature (279)..(279): n is a, c, g, or t
  misc_feature (291)..(291): n is a, c, g, or t
  misc_feature (294)..(294): n is a, c, g, or t
  misc_feature (297)..(297): n is a, c, g, or t
  misc_feature (303)..(303): n is a, c, g, or t
  misc_feature (306)..(306): n is a, c, g, or t
  misc_feature (309)..(309): n is a, c, g, or t
  misc_feature (312)..(312): n is a, c, g, or t
  misc_feature (321)..(321): n is a, c, g, or t
  misc_feature (327)..(327): n is a, c, g, or t
  misc_feature (336)..(336): n is a, c, g, or t
  misc_feature (339)..(339): n is a, c, g, or t
  misc_feature (342)..(342): n is a, c, g, or t
  misc_feature (348)..(348): n is a, c, g, or t
  misc_feature (351)..(351): n is a, c, g, or t
  misc_feature (357)..(357): n is a, c, g, or t
  misc_feature (369)..(369): n is a, c, g, or t
  misc_feature (372)..(372): n is a, c, g, or t
  misc_feature (378)..(378): n is a, c, g, or t
  misc_feature (384)..(384): n is a, c, g, or t
  misc_feature (387)..(387): n is a, c, g, or t
  misc_feature (390)..(390): n is a, c, g, or t
  misc_feature (393)..(393): n is a, c, g, or t
  misc_feature (399)..(399): n is a, c, g, or t
gcngtnaarathwsnggngtnytnaargayggnacnggnaarccngtngaraaytgyacnathcarytnaargcnmgnmgnacnwsnwsnacngtngtngtnaayacngtngcnwsngaraayccngaygargcnggnmgntaywsnatggaygtngartayggncartaywsngtnathytnytngtngarggnttyccnccnwsncaygcnggnacnathacngtntaygargaywsnmgnccnggnacnytnaaygayttyytnggngcnatgwsngargaygaygtnmgnccngargcnytnmgnmgnttygarytnatggtngargargcngcnmgncaygcnggngargcnaaraaraaygcnggngargcngaracnwsngcnmgnaaygcn

SEQ ID NO: 747 - DNA, 399 bp, Artificial Sequence
  PfN-CNA41
  misc_feature (3)..(3): n is a, c, g, or t
  misc_feature (6)..(6): n is a, c, g, or t
  misc_feature (15)..(15): n is a, c, g, or t
  misc_feature (18)..(18): n is a, c, g, or t
  misc_feature (21)..(21): n is a, c, g, or t
  misc_feature (24)..(24): n is a, c, g, or t
  misc_feature (33)..(33): n is a, c, g, or t
  misc_feature (36)..(36): n is a, c, g, or t
  misc_feature (39)..(39): n is a, c, g, or t
  misc_feature (45)..(45): n is a, c, g, or t
  misc_feature (48)..(48): n is a, c, g, or t
  misc_feature (60)..(60): n is a, c, g, or t
  misc_feature (66)..(66): n is a, c, g, or t
  misc_feature (69)..(69): n is a, c, g, or t
  misc_feature (75)..(75): n is a, c, g, or t
  misc_feature (78)..(78): n is a, c, g, or t
  misc_feature (81)..(81): n is a, c, g, or t
  misc_feature (84)..(84): n is a, c, g, or t
  misc_feature (87)..(87): n is a, c, g, or t
  misc_feature (90)..(90): n is a, c, g, or t
  misc_feature (93)..(93): n is a, c, g, or t
  misc_feature (96)..(96): n is a, c, g, or t
  misc_feature (99)..(99): n is a, c, g, or t
  misc_feature (102)..(102): n is a, c, g, or t
  misc_feature (108)..(108): n is a, c, g, or t
  misc_feature (111)..(111): n is a, c, g, or t
  misc_feature (114)..(114): n is a, c, g, or t
  misc_feature (117)..(117): n is a, c, g, or t
  misc_feature (126)..(126): n is a, c, g, or t
  misc_feature (135)..(135): n is a, c, g, or t
  misc_feature (138)..(138): n is a, c, g, or t
  misc_feature (141)..(141): n is a, c, g, or t
  misc_feature (147)..(147): n is a, c, g, or t
  misc_feature (156)..(156): n is a, c, g, or t
  misc_feature (165)..(165): n is a, c, g, or t
  misc_feature (174)..(174): n is a, c, g, or t
  misc_feature (177)..(177): n is a, c, g, or t
  misc_feature (183)..(183): n is a, c, g, or t
  misc_feature (186)..(186): n is a, c, g, or t
  misc_feature (189)..(189): n is a, c, g, or t
  misc_feature (195)..(195): n is a, c, g, or t
  misc_feature (201)..(201): n is a, c, g, or t
  misc_feature (204)..(204): n is a, c, g, or t
  misc_feature (207)..(207): n is a, c, g, or t
  misc_feature (213)..(213): n is a, c, g, or t
  misc_feature (216)..(216): n is a, c, g, or t
  misc_feature (219)..(219): n is a, c, g, or t
  misc_feature (225)..(225): n is a, c, g, or t
  misc_feature (228)..(228): n is a, c, g, or t
  misc_feature (240)..(240): n is a, c, g, or t
  misc_feature (246)..(246): n is a, c, g, or t
  misc_feature (249)..(249): n is a, c, g, or t
  misc_feature (252)..(252): n is a, c, g, or t
  misc_feature (255)..(255): n is a, c, g, or t
  misc_feature (267)..(267): n is a, c, g, or t
  misc_feature (270)..(270): n is a, c, g, or t
  misc_feature (273)..(273): n is a, c, g, or t
  misc_feature (279)..(279): n is a, c, g, or t
  misc_feature (291)..(291): n is a, c, g, or t
  misc_feature (294)..(294): n is a, c, g, or t
  misc_feature (297)..(297): n is a, c, g, or t
  misc_feature (303)..(303): n is a, c, g, or t
  misc_feature (306)..(306): n is a, c, g, or t
  misc_feature (309)..(309): n is a, c, g, or t
  misc_feature (312)..(312): n is a, c, g, or t
  misc_feature (321)..(321): n is a, c, g, or t
  misc_feature (327)..(327): n is a, c, g, or t
  misc_feature (336)..(336): n is a, c, g, or t
  misc_feature (339)..(339): n is a, c, g, or t
  misc_feature (342)..(342): n is a, c, g, or t
  misc_feature (348)..(348): n is a, c, g, or t
  misc_feature (357)..(357): n is a, c, g, or t
  misc_feature (369)..(369): n is a, c, g, or t
  misc_feature (372)..(372): n is a, c, g, or t
  misc_feature (378)..(378): n is a, c, g, or t
  misc_feature (384)..(384): n is a, c, g, or t
  misc_feature (387)..(387): n is a, c, g, or t
  misc_feature (390)..(390): n is a, c, g, or t
  misc_feature (393)..(393): n is a, c, g, or t
  misc_feature (399)..(399): n is a, c, g, or t
acngtnaarathwsnggngtnytnaargayggnacnggnaarccngtncaraaytgyacnathgtnytnaargcnmgnmgnacnwsnwsnacngtngtngtnaayacngtngcnwsngaraayccngaygargcnggnmgntaywsnatggaygtngartayggncartaywsngtnathytnytngtngarggnttyccnccnwsncaygcnggnacnathacngtntaygargaywsncarccnggnacnytnaaygayttyytnggngcnatgwsngargaygaygtnmgnccngargcnytnmgnmgnttygarytnatggtngargargcngcnmgncaygcngargargcnaaraaraaygcnggngargcngaracnwsngcnmgnaaygcn

SEQ ID NO: 748 - DNA, 399 bp, Artificial Sequence
  PfN-CNA42
  misc_feature (3)..(3): n is a, c, g, or t
  misc_feature (6)..(6): n is a, c, g, or t
  misc_feature (15)..(15): n is a, c, g, or t
  misc_feature (18)..(18): n is a, c, g, or t
  misc_feature (21)..(21): n is a, c, g, or t
  misc_feature (24)..(24): n is a, c, g, or t
  misc_feature (33)..(33): n is a, c, g, or t
  misc_feature (36)..(36): n is a, c, g, or t
  misc_feature (39)..(39): n is a, c, g, or t
  misc_feature (45)..(45): n is a, c, g, or t
  misc_feature (48)..(48): n is a, c, g, or t
  misc_feature (60)..(60): n is a, c, g, or t
  misc_feature (66)..(66): n is a, c, g, or t
  misc_feature (69)..(69): n is a, c, g, or t
  misc_feature (75)..(75): n is a, c, g, or t
  misc_feature (78)..(78): n is a, c, g, or t
  misc_feature (81)..(81): n is a, c, g, or t
  misc_feature (84)..(84): n is a, c, g, or t
  misc_feature (87)..(87): n is a, c, g, or t
  misc_feature (90)..(90): n is a, c, g, or t
  misc_feature (93)..(93): n is a, c, g, or t
  misc_feature (96)..(96): n is a, c, g, or t
  misc_feature (99)..(99): n is a, c, g, or t
  misc_feature (102)..(102): n is a, c, g, or t
  misc_feature (108)..(108): n is a, c, g, or t
  misc_feature (111)..(111): n is a, c, g, or t
  misc_feature (114)..(114): n is a, c, g, or t
  misc_feature (117)..(117): n is a, c, g, or t
  misc_feature (126)..(126): n is a, c, g, or t
  misc_feature (135)..(135): n is a, c, g, or t
  misc_feature (138)..(138): n is a, c, g, or t
  misc_feature (141)..(141): n is a, c, g, or t
  misc_feature (147)..(147): n is a, c, g, or t
  misc_feature (156)..(156): n is a, c, g, or t
  misc_feature (165)..(165): n is a, c, g, or t
  misc_feature (174)..(174): n is a, c, g, or t
  misc_feature (177)..(177): n is a, c, g, or t
  misc_feature (180)..(180): n is a, c, g, or t
  misc_feature (183)..(183): n is a, c, g, or t
  misc_feature (186)..(186): n is a, c, g, or t
  misc_feature (189)..(189): n is a, c, g, or t
  misc_feature (195)..(195): n is a, c, g, or t
  misc_feature (201)..(201): n is a, c, g, or t
  misc_feature (204)..(204): n is a, c, g, or t
  misc_feature (207)..(207): n is a, c, g, or t
  misc_feature (213)..(213): n is a, c, g, or t
  misc_feature (216)..(216): n is a, c, g, or t
  misc_feature (219)..(219): n is a, c, g, or t
  misc_feature (225)..(225): n is a, c, g, or t
  misc_feature (228)..(228): n is a, c, g, or t
  misc_feature (237)..(237): n is a, c, g, or t
  misc_feature (240)..(240): n is a, c, g, or t
  misc_feature (243)..(243): n is a, c, g, or t
  misc_feature (246)..(246): n is a, c, g, or t
  misc_feature (249)..(249): n is a, c, g, or t
  misc_feature (252)..(252): n is a, c, g, or t
  misc_feature (255)..(255): n is a, c, g, or t
  misc_feature (267)..(267): n is a, c, g, or t
  misc_feature (270)..(270): n is a, c, g, or t
  misc_feature (273)..(273): n is a, c, g, or t
  misc_feature (279)..(279): n is a, c, g, or t
  misc_feature (291)..(291): n is a, c, g, or t
  misc_feature (294)..(294): n is a, c, g, or t
  misc_feature (297)..(297): n is a, c, g, or t
  misc_feature (303)..(303): n is a, c, g, or t
  misc_feature (306)..(306): n is a, c, g, or t
  misc_feature (309)..(309): n is a, c, g, or t
  misc_feature (312)..(312): n is a, c, g, or t
  misc_feature (321)..(321): n is a, c, g, or t
  misc_feature (327)..(327): n is a, c, g, or t
  misc_feature (336)..(336): n is a, c, g, or t
  misc_feature (339)..(339): n is a, c, g, or t
  misc_feature (342)..(342): n is a, c, g, or t
  misc_feature (348)..(348): n is a, c, g, or t
  misc_feature (357)..(357): n is a, c, g, or t
  misc_feature (369)..(369): n is a, c, g, or t
  misc_feature (372)..(372): n is a, c, g, or t
  misc_feature (378)..(378): n is a, c, g, or t
  misc_feature (384)..(384): n is a, c, g, or t
  misc_feature (387)..(387): n is a, c, g, or t
  misc_feature (390)..(390): n is a, c, g, or t
  misc_feature (393)..(393): n is a, c, g, or t
  misc_feature (399)..(399): n is a, c, g, or t
acngtnaarathwsnggngtnytnaargayggnacnggnaarccngtncaraaytgyacnathgtnytnaargcnmgnmgnacnwsnwsnacngtngtngtnaayacngtngcnwsngaraayccngaygargcnggnmgntaywsnatggaygtngarcayggncartaywsngtnacnytnytngtngarggnttyccnccnwsncaygcnggnacnathacngtntaygarggnwsnmgnccnggnacnytnaaygayttyytnggngcnatgacngargaygaygtnmgnccngargcnytnmgnmgnttygarytnatggtngargargcngcnmgncaygcngargargcnaaraaraaygcnggngargcngaracnwsngcnmgnaaygcn

SEQ ID NO: 749 - DNA, 399 bp, Artificial Sequence
  PfN-CNA43
  misc_feature (3)..(3): n is a, c, g, or t
  misc_feature (6)..(6): n is a, c, g, or t
  misc_feature (15)..(15): n is a, c, g, or t
  misc_feature (18)..(18): n is a, c, g, or t
  misc_feature (21)..(21): n is a, c, g, or t
  misc_feature (24)..(24): n is a, c, g, or t
  misc_feature (33)..(33): n is a, c, g, or t
  misc_feature (36)..(36): n is a, c, g, or t
  misc_feature (39)..(39): n is a, c, g, or t
  misc_feature (45)..(45): n is a, c, g, or t
  misc_feature (48)..(48): n is a, c, g, or t
  misc_feature (60)..(60): n is a, c, g, or t
  misc_feature (66)..(66): n is a, c, g, or t
  misc_feature (69)..(69): n is a, c, g, or t
  misc_feature (75)..(75): n is a, c, g, or t
  misc_feature (78)..(78): n is a, c, g, or t
  misc_feature (81)..(81): n is a, c, g, or t
  misc_feature (84)..(84): n is a, c, g, or t
  misc_feature (87)..(87): n is a, c, g, or t
  misc_feature (90)..(90): n is a, c, g, or t
  misc_feature (93)..(93): n is a, c, g, or t
  misc_feature (96)..(96): n is a, c, g, or t
  misc_feature (99)..(99): n is a, c, g, or t
  misc_feature (102)..(102): n is a, c, g, or t
  misc_feature (108)..(108): n is a, c, g, or t
  misc_feature (111)..(111): n is a, c, g, or t
  misc_feature (114)..(114): n is a, c, g, or t
  misc_feature (117)..(117): n is a, c, g, or t
  misc_feature (126)..(126): n is a, c, g, or t
  misc_feature (135)..(135): n is a, c, g, or t
  misc_feature (138)..(138): n is a, c, g, or t
  misc_feature (141)..(141): n is a, c, g, or t
  misc_feature (147)..(147): n is a, c, g, or t
  misc_feature (156)..(156): n is a, c, g, or t
  misc_feature (165)..(165): n is a, c, g, or t
  misc_feature (174)..(174): n is a, c, g, or t
  misc_feature (177)..(177): n is a, c, g, or t
  misc_feature (180)..(180): n is a, c, g, or t
  misc_feature (183)..(183): n is a, c, g, or t
  misc_feature (186)..(186): n is a, c, g, or t
  misc_feature (189)..(189): n is a, c, g, or t
  misc_feature (195)..(195): n is a, c, g, or t
  misc_feature (201)..(201): n is a, c, g, or t
  misc_feature (204)..(204): n is a, c, g, or t
  misc_feature (207)..(207): n is a, c, g, or t
  misc_feature (213)..(213): n is a, c, g, or t
  misc_feature (216)..(216): n is a, c, g, or t
  misc_feature (219)..(219): n is a, c, g, or t
  misc_feature (225)..(225): n is a, c, g, or t
  misc_feature (228)..(228): n is a, c, g, or t
  misc_feature (240)..(240): n is a, c, g, or t
  misc_feature (243)..(243): n is a, c, g, or t
  misc_feature (246)..(246): n is a, c, g, or t
  misc_feature (249)..(249): n is a, c, g, or t
  misc_feature (252)..(252): n is a, c, g, or t
  misc_feature (255)..(255): n is a, c, g, or t
  misc_feature (267)..(267): n is a, c, g, or t
  misc_feature (270)..(270): n is a, c, g, or t
  misc_feature (273)..(273): n is a, c, g, or t
  misc_feature (279)..(279): n is a, c, g, or t
  misc_feature (291)..(291): n is a, c, g, or t
  misc_feature (294)..(294): n is a, c, g, or t
  misc_feature (297)..(297): n is a, c, g, or t
  misc_feature (303)..(303): n is a, c, g, or t
  misc_feature (306)..(306): n is a, c, g, or t
  misc_feature (309)..(309): n is a, c, g, or t
  misc_feature (312)..(312): n is a, c, g, or t
  misc_feature (321)..(321): n is a, c, g, or t
  misc_feature (327)..(327): n is a, c, g, or t
  misc_feature (336)..(336): n is a, c, g, or t
  misc_feature (339)..(339): n is a, c, g, or t
  misc_feature (342)..(342): n is a, c, g, or t
  misc_feature (348)..(348): n is a, c, g, or t
  misc_feature (357)..(357): n is a, c, g, or t
  misc_feature (369)..(369): n is a, c, g, or t
  misc_feature (372)..(372): n is a, c, g, or t
  misc_feature (378)..(378): n is a, c, g, or t
  misc_feature (384)..(384): n is a, c, g, or t
  misc_feature (387)..(387): n is a, c, g, or t
  misc_feature (390)..(390): n is a, c, g, or t
  misc_feature (393)..(393): n is a, c, g, or t
  misc_feature (399)..(399): n is a, c, g, or t
acngtnaarathwsnggngtnytnaargayggnacnggnaarccngtncaraaytgyacnathgtnytnaargcnmgnmgnacnwsnwsnacngtngtngtnaayacngtngcnwsngaraayccngaygargcnggnmgntaywsnatggaygtngarcayggncartaywsngtnacnytnytngtngarggnttyccnccnwsncaygcnggnacnathacngtntaygargaywsnmgnccnggnacnytnaaygayttyytnggngcnatgacngargaygaygcnmgnccngargcnytnmgnmgnttygarytnatggtngargargtngtnmgnaaygcngargargcnaaraaraaygcnggngargcngaracnwsngcnmgnaaygcn

SEQ ID NO: 750 - DNA, 399 bp, Artificial Sequence
  PfN-CNA44
  misc_feature (3)..(3): n is a, c, g, or t
  misc_feature (6)..(6): n is a, c, g, or t
  misc_feature (15)..(15): n is a, c, g, or t
  misc_feature (18)..(18): n is a, c, g, or t
  misc_feature (21)..(21): n is a, c, g, or t
  misc_feature (24)..(24): n is a, c, g, or t
  misc_feature (33)..(33): n is a, c, g, or t
  misc_feature (36)..(36): n is a, c, g, or t
  misc_feature (39)..(39): n is a, c, g, or t
  misc_feature (45)..(45): n is a, c, g, or t
  misc_feature (48)..(48): n is a, c, g, or t
  misc_feature (60)..(60): n is a, c, g, or t
  misc_feature (66)..(66): n is a, c, g, or t
  misc_feature (69)..(69): n is a, c, g, or t
  misc_feature (75)..(75): n is a, c, g, or t
  misc_feature (78)..(78): n is a, c, g, or t
  misc_feature (81)..(81): n is a, c, g, or t
  misc_feature (84)..(84): n is a, c, g, or t
  misc_feature (87)..(87): n is a, c, g, or t
  misc_feature (90)..(90): n is a, c, g, or t
  misc_feature (93)..(93): n is a, c, g, or t
  misc_feature (96)..(96): n is a, c, g, or t
  misc_feature (99)..(99): n is a, c, g, or t
  misc_feature (102)..(102): n is a, c, g, or t
  misc_feature (108)..(108): n is a, c, g, or t
  misc_feature (111)..(111): n is a, c, g, or t
  misc_feature (114)..(114): n is a, c, g, or t
  misc_feature (117)..(117): n is a, c, g, or t
  misc_feature (126)..(126): n is a, c, g, or t
  misc_feature (135)..(135): n is a, c, g, or t
  misc_feature (138)..(138): n is a, c, g, or t
  misc_feature (141)..(141): n is a, c, g, or t
  misc_feature (147)..(147): n is a, c, g, or t
  misc_feature (156)..(156): n is a, c, g, or t
  misc_feature (165)..(165): n is a, c, g, or t
  misc_feature (174)..(174): n is a, c, g, or t
  misc_feature (177)..(177): n is a, c, g, or t
  misc_feature (180)..(180): n is a, c, g, or t
  misc_feature (183)..(183): n is a, c, g, or t
  misc_feature (186)..(186): n is a, c, g, or t
  misc_feature (189)..(189): n is a, c, g, or t
  misc_feature (201)..(201): n is a, c, g, or t
  misc_feature (204)..(204): n is a, c, g, or t
  misc_feature (207)..(207): n is a, c, g, or t
  misc_feature (213)..(213): n is a, c, g, or t
  misc_feature (216)..(216): n is a, c, g, or t
  misc_feature (219)..(219): n is a, c, g, or t
  misc_feature (225)..(225): n is a, c, g, or t
  misc_feature (228)..(228): n is a, c, g, or t
  misc_feature (237)..(237): n is a, c, g, or t
  misc_feature (240)..(240): n is a, c, g, or t
  misc_feature (243)..(243): n is a, c, g, or t
  misc_feature (246)..(246): n is a, c, g, or t
  misc_feature (249)..(249): n is a, c, g, or t
  misc_feature (252)..(252): n is a, c, g, or t
  misc_feature (255)..(255): n is a, c, g, or t
  misc_feature (267)..(267): n is a, c, g, or t
  misc_feature (270)..(270): n is a, c, g, or t
  misc_feature (273)..(273): n is a, c, g, or t
  misc_feature (279)..(279): n is a, c, g, or t
  misc_feature (291)..(291): n is a, c, g, or t
  misc_feature (294)..(294): n is a, c, g, or t
  misc_feature (297)..(297): n is a, c, g, or t
  misc_feature (303)..(303): n is a, c, g, or t
  misc_feature (306)..(306): n is a, c, g, or t
  misc_feature (309)..(309): n is a, c, g, or t
  misc_feature (312)..(312): n is a, c, g, or t
  misc_feature (321)..(321): n is a, c, g, or t
  misc_feature (327)..(327): n is a, c, g, or t
  misc_feature (336)..(336): n is a, c, g, or t
  misc_feature (339)..(339): n is a, c, g, or t
  misc_feature (342)..(342): n is a, c, g, or t
  misc_feature (348)..(348): n is a, c, g, or t
  misc_feature (351)..(351): n is a, c, g, or t
  misc_feature (354)..(354): n is a, c, g, or t
  misc_feature (357)..(357): n is a, c, g, or t
  misc_feature (360)..(360): n is a, c, g, or t
  misc_feature (366)..(366): n is a, c, g, or t
  misc_feature (369)..(369): n is a, c, g, or t
  misc_feature (372)..(372): n is a, c, g, or t
  misc_feature (375)..(375): n is a, c, g, or t
  misc_feature (378)..(378): n is a, c, g, or t
  misc_feature (387)..(387): n is a, c, g, or t
  misc_feature (393)..(393): n is a, c, g, or t
  misc_feature (396)..(396): n is a, c, g, or t
  misc_feature (399)..(399): n is a, c, g, or t
acngtnaarathwsnggngtnytnaargayggnacnggnaarccngtncaraaytgyacnathgtnytnaargcnmgnmgnacnwsnwsnacngtngtngtnaayacngtngcnwsngaraayccngaygargcnggnmgntaywsnatggaygtngartayggncartaywsngtnacnytnytngtngargayttyccnccnwsncaygcnggnacnathacngtntaygarggnwsnmgnccnggnacnytnaaygayttyytnggngcnatgacngargaygaygtnmgnccngargcnytnmgnmgnttygarytnatggtnaaygargtngcnmgncaygcnggngcnwsnwsncarwsngcngcngcngcnaaraarwsngaracngcngcn

SEQ ID NO: 751 - DNA, 399 bp, Artificial Sequence
  PfN-CNA45
  misc_feature (3)..(3): n is a, c, g, or t
  misc_feature (6)..(6): n is a, c, g, or t
  misc_feature (15)..(15): n is a, c, g, or t
  misc_feature (18)..(18): n is a, c, g, or t
  misc_feature (21)..(21): n is a, c, g, or t
  misc_feature (24)..(24): n is a, c, g, or t
  misc_feature (33)..(33): n is a, c, g, or t
  misc_feature (36)..(36): n is a, c, g, or t
  misc_feature (39)..(39): n is a, c, g, or t
  misc_feature (45)..(45): n is a, c, g, or t
  misc_feature (48)..(48): n is a, c, g, or t
  misc_feature (60)..(60): n is a, c, g, or t
  misc_feature (66)..(66): n is a, c, g, or t
  misc_feature (69)..(69): n is a, c, g, or t
  misc_feature (75)..(75): n is a, c, g, or t
  misc_feature (78)..(78): n is a, c, g, or t
  misc_feature (81)..(81): n is a, c, g, or t
  misc_feature (84)..(84): n is a, c, g, or t
  misc_feature (87)..(87): n is a, c, g, or t
  misc_feature (90)..(90): n is a, c, g, or t
  misc_feature (93)..(93): n is a, c, g, or t
  misc_feature (96)..(96): n is a, c, g, or t
  misc_feature (99)..(99): n is a, c, g, or t
  misc_feature (102)..(102): n is a, c, g, or t
  misc_feature (108)..(108): n is a, c, g, or t
  misc_feature (111)..(111): n is a, c, g, or t
  misc_feature (114)..(114): n is a, c, g, or t
  misc_feature (117)..(117): n is a, c, g, or t
  misc_feature (126)..(126): n is a, c, g, or t
  misc_feature (135)..(135): n is a, c, g, or t
  misc_feature (138)..(138): n is a, c, g, or t
  misc_feature (141)..(141): n is a, c, g, or t
  misc_feature (147)..(147): n is a, c, g, or t
  misc_feature (156)..(156): n is a, c, g, or t
  misc_feature (165)..(165): n is a, c, g, or t
  misc_feature (174)..(174): n is a, c, g, or t
  misc_feature (177)..(177): n is a, c, g, or t
  misc_feature (180)..(180): n is a, c, g, or t
  misc_feature (183)..(183): n is a, c, g, or t
  misc_feature (186)..(186): n is a, c, g, or t
  misc_feature (189)..(189): n is a, c, g, or t
  misc_feature (201)..(201): n is a, c, g, or t
  misc_feature (204)..(204): n is a, c, g, or t
  misc_feature (207)..(207): n is a, c, g, or t
  misc_feature (213)..(213): n is a, c, g, or t
  misc_feature (216)..(216): n is a, c, g, or t
  misc_feature (219)..(219): n is a, c, g, or t
  misc_feature (225)..(225): n is a, c, g, or t
  misc_feature (228)..(228): n is a, c, g, or t
  misc_feature (237)..(237): n is a, c, g, or t
  misc_feature (240)..(240): n is a, c, g, or t
  misc_feature (243)..(243): n is a, c, g, or t
  misc_feature (246)..(246): n is a, c, g, or t
  misc_feature (249)..(249): n is a, c, g, or t
  misc_feature (252)..(252): n is a, c, g, or t
  misc_feature (255)..(255): n is a, c, g, or t
  misc_feature (267)..(267): n is a, c, g, or t
  misc_feature (270)..(270): n is a, c, g, or t
  misc_feature (273)..(273): n is a, c, g, or t
  misc_feature (279)..(279): n is a, c, g, or t
  misc_feature (291)..(291): n is a, c, g, or t
  misc_feature (297)..(297): n is a, c, g, or t
  misc_feature (303)..(303): n is a, c, g, or t
  misc_feature (306)..(306): n is a, c, g, or t
  misc_feature (309)..(309): n is a, c, g, or t
  misc_feature (312)..(312): n is a, c, g, or t
  misc_feature (321)..(321): n is a, c, g, or t
  misc_feature (327)..(327): n is a, c, g, or t
  misc_feature (336)..(336): n is a, c, g, or t
  misc_feature (339)..(339): n is a, c, g, or t
  misc_feature (342)..(342): n is a, c, g, or t
  misc_feature (348)..(348): n is a, c, g, or t
  misc_feature (351)..(351): n is a, c, g, or t
  misc_feature (354)..(354): n is a, c, g, or t
  misc_feature (357)..(357): n is a, c, g, or t
  misc_feature (360)..(360): n is a, c, g, or t
  misc_feature (366)..(366): n is a, c, g, or t
  misc_feature (369)..(369): n is a, c, g, or t
  misc_feature (372)..(372): n is a, c, g, or t
  misc_feature (375)..(375): n is a, c, g, or t
  misc_feature (378)..(378): n is a, c, g, or t
  misc_feature (387)..(387): n is a, c, g, or t
  misc_feature (393)..(393): n is a, c, g, or t
  misc_feature (396)..(396): n is a, c, g, or t
  misc_feature (399)..(399): n is a, c, g, or t
acngtnaarathwsnggngtnytnaargayggnacnggnaarccngtncaraaytgyacnathgtnytnaargcnmgnmgnacnwsnwsnacngtngtngtnaayacngtngcnwsngaraayccngaygargcnggnmgntaywsnatggaygtngartayggncartaywsngtnacnytnytngtngargayttyccnccnwsncaygcnggnacnathacngtntaygarggnwsnmgnccnggnacnytnaaygayttyytnggngcnatgacngargaygaygtnatgccngargcnytnmgnmgnttygarytnatggtnaaygargtngcnmgncaygcnggngcnwsnwsncarwsngcngcngcngcnaaraarwsngaracngcngcn

SEQ ID NO: 752 - DNA, 399 bp, Artificial Sequence
  PfN-CNA46
  misc_feature (3)..(3): n is a, c, g, or t
  misc_feature (6)..(6): n is a, c, g, or t
  misc_feature (15)..(15): n is a, c, g, or t
  misc_feature (18)..(18): n is a, c, g, or t
  misc_feature (21)..(21): n is a, c, g, or t
  misc_feature (24)..(24): n is a, c, g, or t
  misc_feature (33)..(33): n is a, c, g, or t
  misc_feature (36)..(36): n is a, c, g, or t
  misc_feature (39)..(39): n is a, c, g, or t
  misc_feature (45)..(45): n is a, c, g, or t
  misc_feature (48)..(48): n is a, c, g, or t
  misc_feature (60)..(60): n is a, c, g, or t
  misc_feature (66)..(66): n is a, c, g, or t
  misc_feature (69)..(69): n is a, c, g, or t
  misc_feature (75)..(75): n is a, c, g, or t
  misc_feature (78)..(78): n is a, c, g, or t
  misc_feature (81)..(81): n is a, c, g, or t
  misc_feature (84)..(84): n is a, c, g, or t
  misc_feature (87)..(87): n is a, c, g, or t
  misc_feature (90)..(90): n is a, c, g, or t
  misc_feature (93)..(93): n is a, c, g, or t
  misc_feature (96)..(96): n is a, c, g, or t
  misc_feature (99)..(99): n is a, c, g, or t
  misc_feature (102)..(102): n is a, c, g, or t
  misc_feature (108)..(108): n is a, c, g, or t
  misc_feature (111)..(111): n is a, c, g, or t
  misc_feature (114)..(114): n is a, c, g, or t
  misc_feature (117)..(117): n is a, c, g, or t
  misc_feature (126)..(126): n is a, c, g, or t
  misc_feature (135)..(135): n is a, c, g, or t
  misc_feature (138)..(138): n is a, c, g, or t
  misc_feature (141)..(141): n is a, c, g, or t
  misc_feature (147)..(147): n is a, c, g, or t
  misc_feature (156)..(156): n is a, c, g, or t
  misc_feature (165)..(165): n is a, c, g, or t
  misc_feature (174)..(174): n is a, c, g, or t
  misc_feature (177)..(177): n is a, c, g, or t
  misc_feature (180)..(180): n is a, c, g, or t
  misc_feature (183)..(183): n is a, c, g, or t
  misc_feature (186)..(186): n is a, c, g, or t
  misc_feature (189)..(189): n is a, c, g, or t
  misc_feature (195)..(195): n is a, c, g, or t
  misc_feature (201)..(201): n is a, c, g, or t
  misc_feature (204)..(204): n is a, c, g, or t
  misc_feature (207)..(207): n is a, c, g, or t
  misc_feature (213)..(213): n is a, c, g, or t
  misc_feature (216)..(216): n is a, c, g, or t
  misc_feature (219)..(219): n is a, c, g, or t
  misc_feature (225)..(225): n is a, c, g, or t
  misc_feature (228)..(228): n is a, c, g, or t
  misc_feature (237)..(237): n is a, c, g, or t
  misc_feature (240)..(240): n is a, c, g, or t
  misc_feature (243)..(243): n is a, c, g, or t
  misc_feature (246)..(246): n is a, c, g, or t
  misc_feature (249)..(249): n is a, c, g, or t
  misc_feature (252)..(252): n is a, c, g, or t
  misc_feature (255)..(255): n is a, c, g, or t
  misc_feature (267)..(267): n is a, c, g, or t
  misc_feature (270)..(270): n is a, c, g, or t
  misc_feature (273)..(273): n is a, c, g, or t
  misc_feature (279)..(279): n is a, c, g, or t
  misc_feature (291)..(291): n is a, c, g, or t
  misc_feature (294)..(294): n is a, c, g, or t
  misc_feature (297)..(297): n is a, c, g, or t
  misc_feature (303)..(303): n is a, c, g, or t
  misc_feature (306)..(306): n is a, c, g, or t
  misc_feature (309)..(309): n is a, c, g, or t
  misc_feature (312)..(312): n is a, c, g, or t
  misc_feature (321)..(321): n is a, c, g, or t
  misc_feature (327)..(327): n is a, c, g, or t
  misc_feature (336)..(336): n is a, c, g, or t
  misc_feature (339)..(339): n is a, c, g, or t
  misc_feature (342)..(342): n is a, c, g, or t
  misc_feature (348)..(348): n is a, c, g, or t
  misc_feature (351)..(351): n is a, c, g, or t
  misc_feature (354)..(354): n is a, c, g, or t
  misc_feature (357)..(357): n is a, c, g, or t
  misc_feature (360)..(360): n is a, c, g, or t
  misc_feature (366)..(366): n is a, c, g, or t
  misc_feature (369)..(369): n is a, c, g, or t
  misc_feature (372)..(372): n is a, c, g, or t
  misc_feature (375)..(375): n is a, c, g, or t
  misc_feature (378)..(378): n is a, c, g, or t
  misc_feature (387)..(387): n is a, c, g, or t
  misc_feature (393)..(393): n is a, c, g, or t
  misc_feature (396)..(396): n is a, c, g, or t
  misc_feature (399)..(399): n is a, c, g, or t
acngtnaarathwsnggngtnytnaargayggnacnggnaarccngtncaraaytgyacnathgtnytnaargcnmgnmgnacnwsnwsnacngtngtngtnaayacngtngcnwsngaraayccngaygargcnggnmgntaywsnatggaygtngartayggncartaywsngtnacnytnytngtngarggnttyccnccnwsncaygcnggnacnathacngtntaygarggnwsnmgnccnggnacnytnaaygayttyytnggngcnatgacngargaygaygtnmgnccngargcnytnmgnmgnttygarytnatggtnaaygargtngcnmgncaygcnggngcnwsnwsncarwsngcngcngcngcnaaraarwsngaracngcngcn

SEQ ID NO: 753 - DNA, 399 bp, Artificial Sequence
  PfN-CNA47
  misc_feature (3)..(3): n is a, c, g, or t
  misc_feature (6)..(6): n is a, c, g, or t
  misc_feature (15)..(15): n is a, c, g, or t
  misc_feature (18)..(18): n is a, c, g, or t
  misc_feature (21)..(21): n is a, c, g, or t
  misc_feature (24)..(24): n is a, c, g, or t
  misc_feature (33)..(33): n is a, c, g, or t
  misc_feature (36)..(36): n is a, c, g, or t
  misc_feature (39)..(39): n is a, c, g, or t
  misc_feature (45)..(45): n is a, c, g, or t
  misc_feature (60)..(60): n is a, c, g, or t
  misc_feature (69)..(69): n is a, c, g, or t
  misc_feature (75)..(75): n is a, c, g, or t
  misc_feature (81)..(81): n is a, c, g, or t
  misc_feature (87)..(87): n is a, c, g, or t
  misc_feature (90)..(90): n is a, c, g, or t
  misc_feature (93)..(93): n is a, c, g, or t
  misc_feature (96)..(96): n is a, c, g, or t
  misc_feature (99)..(99): n is a, c, g, or t
  misc_feature (102)..(102): n is a, c, g, or t
  misc_feature (108)..(108): n is a, c, g, or t
  misc_feature (111)..(111): n is a, c, g, or t
  misc_feature (114)..(114): n is a, c, g, or t
  misc_feature (117)..(117): n is a, c, g, or t
  misc_feature (126)..(126): n is a, c, g, or t
  misc_feature (135)..(135): n is a, c, g, or t
  misc_feature (138)..(138): n is a, c, g, or t
  misc_feature (141)..(141): n is a, c, g, or t
  misc_feature (147)..(147): n is a, c, g, or t
  misc_feature (156)..(156): n is a, c, g, or t
  misc_feature (165)..(165): n is a, c, g, or t
  misc_feature (174)..(174): n is a, c, g, or t
  misc_feature (177)..(177): n is a, c, g, or t
  misc_feature (183)..(183): n is a, c, g, or t
  misc_feature (186)..(186): n is a, c, g, or t
  misc_feature (189)..(189): n is a, c, g, or t
  misc_feature (195)..(195): n is a, c, g, or t
  misc_feature (201)..(201): n is a, c, g, or t
  misc_feature (204)..(204): n is a, c, g, or t
  misc_feature (207)..(207): n is a, c, g, or t
  misc_feature (213)..(213): n is a, c, g, or t
  misc_feature (216)..(216): n is a, c, g, or t
  misc_feature (219)..(219): n is a, c, g, or t
  misc_feature (225)..(225): n is a, c, g, or t
  misc_feature (228)..(228): n is a, c, g, or t
  misc_feature (240)..(240): n is a, c, g, or t
  misc_feature (246)..(246): n is a, c, g, or t
  misc_feature (249)..(249): n is a, c, g, or t
  misc_feature (252)..(252): n is a, c, g, or t
  misc_feature (255)..(255): n is a, c, g, or t
  misc_feature (267)..(267): n is a, c, g, or t
  misc_feature (270)..(270): n is a, c, g, or t
  misc_feature (273)..(273): n is a, c, g, or t
  misc_feature (276)..(276): n is a, c, g, or t
  misc_feature (279)..(279): n is a, c, g, or t
  misc_feature (291)..(291): n is a, c, g, or t
  misc_feature (294)..(294): n is a, c, g, or t
  misc_feature (297)..(297): n is a, c, g, or t
  misc_feature (303)..(303): n is a, c, g, or t
  misc_feature (306)..(306): n is a, c, g, or t
  misc_feature (312)..(312): n is a, c, g, or t
  misc_feature (327)..(327): n is a, c, g, or t
  misc_feature (336)..(336): n is a, c, g, or t
  misc_feature (339)..(339): n is a, c, g, or t
  misc_feature (342)..(342): n is a, c, g, or t
  misc_feature (348)..(348): n is a, c, g, or t
  misc_feature (354)..(354): n is a, c, g, or t
  misc_feature (357)..(357): n is a, c, g, or t
  misc_feature (360)..(360): n is a, c, g, or t
  misc_feature (366)..(366): n is a, c, g, or t
  misc_feature (369)..(369): n is a, c, g, or t
  misc_feature (372)..(372): n is a, c, g, or t
  misc_feature (375)..(375): n is a, c, g, or t
  misc_feature (378)..(378): n is a, c, g, or t
  misc_feature (387)..(387): n is a, c, g, or t
  misc_feature (393)..(393): n is a, c, g, or t
  misc_feature (396)..(396): n is a, c, g, or t
  misc_feature (399)..(399): n is a, c, g, or t
gcngtncarathwsnggngtnytnaargayggngcnggnaarccnathcaraaytgyacnathcarytnaargcnaarmgnaaywsnacnacngtngtngtnaayacngtngcnwsngaraayccngaygargcnggnmgntaywsnatggaygtngartayggncartaywsngtnathytnytngtngarggnttyccnccnwsncaygcnggngcnathacngtntaygargaywsnaarccnggnacnytnaaygayttyytnggngcngcnacngargaygaygtnmgnccngargcnytntaymgnttygaraaratggtngargargtngcnmgnaaygcngargcngcnwsncarwsngcngcngcngcnaaraarwsngaracngcngcn

SEQ ID NO: 754 - DNA, 399 bp, Artificial Sequence
  PfN-CNA48
  misc_feature (3)..(3): n is a, c, g, or t
  misc_feature (6)..(6): n is a, c, g, or t
  misc_feature (15)..(15): n is a, c, g, or t
  misc_feature (18)..(18): n is a, c, g, or t
  misc_feature (21)..(21): n is a, c, g, or t
  misc_feature (24)..(24): n is a, c, g, or t
  misc_feature (33)..(33): n is a, c, g, or t
  misc_feature (36)..(36): n is a, c, g, or t
  misc_feature (39)..(39): n is a, c, g, or t
  misc_feature (45)..(45): n is a, c, g, or t
  misc_feature (60)..(60): n is a, c, g, or t
  misc_feature (69)..(69): n is a, c, g, or t
  misc_feature (75)..(75): n is a, c, g, or t
  misc_feature (81)..(81): n is a, c, g, or t
  misc_feature (87)..(87): n is a, c, g, or t
  misc_feature (90)..(90): n is a, c, g, or t
  misc_feature (93)..(93): n is a, c, g, or t
  misc_feature (96)..(96): n is a, c, g, or t
  misc_feature (99)..(99): n is a, c, g, or t
  misc_feature (102)..(102): n is a, c, g, or t
  misc_feature (108)..(108): n is a, c, g, or t
  misc_feature (111)..(111): n is a, c, g, or t
  misc_feature (114)..(114): n is a, c, g, or t
  misc_feature (117)..(117): n is a, c, g, or t
  misc_feature (126)..(126): n is a, c, g, or t
  misc_feature (135)..(135): n is a, c, g, or t
  misc_feature (138)..(138): n is a, c, g, or t
  misc_feature (141)..(141): n is a, c, g, or t
  misc_feature (147)..(147): n is a, c, g, or t
  misc_feature (156)..(156): n is a, c, g, or t
  misc_feature (165)..(165): n is a, c, g, or t
  misc_feature (174)..(174): n is a, c, g, or t
  misc_feature (177)..(177): n is a, c, g, or t
  misc_feature (183)..(183): n is a, c, g, or t
  misc_feature (186)..(186): n is a, c, g, or t
  misc_feature (189)..(189): n is a, c, g, or t
  misc_feature (195)..(195): n is a, c, g, or t
  misc_feature (201)..(201): n is a, c, g, or t
  misc_feature (204)..(204): n is a, c, g, or t
  misc_feature (207)..(207): n is a, c, g, or t
  misc_feature (213)..(213): n is a, c, g, or t
  misc_feature (216)..(216): n is a, c, g, or t
  misc_feature (219)..(219): n is a, c, g, or t
  misc_feature (225)..(225): n is a, c, g, or t
  misc_feature (228)..(228): n is a, c, g, or t
  misc_feature (237)..(237): n is a, c, g, or t
  misc_feature (240)..(240): n is a, c, g, or t
  misc_feature (243)..(243): n is a, c, g, or t
  misc_feature (246)..(246): n is a, c, g, or t
  misc_feature (249)..(249): n is a, c, g, or t
  misc_feature (252)..(252): n is a, c, g, or t
  misc_feature (255)..(255): n is a, c, g, or t
  misc_feature (267)..(267): n is a, c, g, or t
  misc_feature (270)..(270): n is a, c, g, or t
  misc_feature (273)..(273): n is a, c, g, or t
  misc_feature (279)..(279): n is a, c, g, or t
  misc_feature (291)..(291): n is a, c, g, or t
  misc_feature (297)..(297): n is a, c, g, or t
  misc_feature (303)..(303): n is a, c, g, or t
  misc_feature (306)..(306): n is a, c, g, or t
  misc_feature (309)..(309): n is a, c, g, or t
  misc_feature (312)..(312): n is a, c, g, or t
  misc_feature (321)..(321): n is a, c, g, or t
  misc_feature (327)..(327): n is a, c, g, or t
  misc_feature (336)..(336): n is a, c, g, or t
  misc_feature (339)..(339): n is a, c, g, or t
  misc_feature (342)..(342): n is a, c, g, or t
  misc_feature (348)..(348): n is a, c, g, or t
  misc_feature (354)..(354): n is a, c, g, or t
  misc_feature (357)..(357): n is a, c, g, or t
  misc_feature (360)..(360): n is a, c, g, or t
  misc_feature (366)..(366): n is a, c, g, or t
  misc_feature (369)..(369): n is a, c, g, or t
  misc_feature (372)..(372): n is a, c, g, or t
  misc_feature (375)..(375): n is a, c, g, or t
  misc_feature (378)..(378): n is a, c, g, or t
  misc_feature (387)..(387): n is a, c, g, or t
  misc_feature (393)..(393): n is a, c, g, or t
  misc_feature (396)..(396): n is a, c, g, or t
  misc_feature (399)..(399): n is a, c, g, or t
gcngtncarathwsnggngtnytnaargayggngcnggnaarccnathcaraaytgyacnathcarytnaargcnaarmgnaaywsnacnacngtnytngtnaayacngtngcnwsngaraayccngaygargcnggnmgntaywsnatggaygtngarcayggncartaywsngtnathytnytngtngarggnttyccnccnwsncaygcnggnacnathacngtntaygarggnwsnmgnccnggnacnytnaaygayttyytnggngcnatgacngargargaygtnatgccngargcnytnmgnmgnttygargtnatggtngargaygtngcnmgnaaygcngargcngcnwsncarwsngcngcngcngcnaaraarwsngaracngcngcn

SEQ ID NO: 755 - DNA, 402 bp, Artificial Sequence
  PfN-CNA49
  misc_feature (3)..(3): n is a, c, g, or t
  misc_feature (6)..(6): n is a, c, g, or t
  misc_feature (9)..(9): n is a, c, g, or t
  misc_feature (18)..(18): n is a, c, g, or t
  misc_feature (21)..(21): n is a, c, g, or t
  misc_feature (24)..(24): n is a, c, g, or t
  misc_feature (27)..(27): n is a, c, g, or t
  misc_feature (36)..(36): n is a, c, g, or t
  misc_feature (39)..(39): n is a, c, g, or t
  misc_feature (42)..(42): n is a, c, g, or t
  misc_feature (48)..(48): n is a, c, g, or t
  misc_feature (63)..(63): n is a, c, g, or t
  misc_feature (72)..(72): n is a, c, g, or t
  misc_feature (78)..(78): n is a, c, g, or t
  misc_feature (84)..(84): n is a, c, g, or t
  misc_feature (90)..(90): n is a, c, g, or t
  misc_feature (93)..(93): n is a, c, g, or t
  misc_feature (96)..(96): n is a, c, g, or t
  misc_feature (99)..(99): n is a, c, g, or t
  misc_feature (102)..(102): n is a, c, g, or t
  misc_feature (105)..(105): n is a, c, g, or t
  misc_feature (111)..(111): n is a, c, g, or t
  misc_feature (114)..(114): n is a, c, g, or t
  misc_feature (117)..(117): n is a, c, g, or t
  misc_feature (120)..(120): n is a, c, g, or t
  misc_feature (129)..(129): n is a, c, g, or t
  misc_feature (138)..(138): n is a, c, g, or t
  misc_feature (141)..(141): n is a, c, g, or t
  misc_feature (144)..(144): n is a, c, g, or t
  misc_feature (150)..(150): n is a, c, g, or t
  misc_feature (159)..(159): n is a, c, g, or t
  misc_feature (168)..(168): n is a, c, g, or t
  misc_feature (177)..(177): n is a, c, g, or t
  misc_feature (180)..(180): n is a, c, g, or t
  misc_feature (186)..(186): n is a, c, g, or t
  misc_feature (189)..(189): n is a, c, g, or t
  misc_feature (192)..(192): n is a, c, g, or t
  misc_feature (198)..(198): n is a, c, g, or t
  misc_feature (204)..(204): n is a, c, g, or t
  misc_feature (207)..(207): n is a, c, g, or t
  misc_feature (210)..(210): n is a, c, g, or t
  misc_feature (216)..(216): n is a, c, g, or t
  misc_feature (219)..(219): n is a, c, g, or t
  misc_feature (222)..(222): n is a, c, g, or t
  misc_feature (228)..(228): n is a, c, g, or t
  misc_feature (231)..(231): n is a, c, g, or t
  misc_feature (240)..(240): n is a, c, g, or t
  misc_feature (243)..(243): n is a, c, g, or t
  misc_feature (246)..(246): n is a, c, g, or t
  misc_feature (249)..(249): n is a, c, g, or t
  misc_feature (252)..(252): n is a, c, g, or t
  misc_feature (255)..(255): n is a, c, g, or t
  misc_feature (258)..(258): n is a, c, g, or t
  misc_feature (270)..(270): n is a, c, g, or t
  misc_feature (273)..(273): n is a, c, g, or t
  misc_feature (276)..(276): n is a, c, g, or t
  misc_feature (282)..(282): n is a, c, g, or t
  misc_feature (294)..(294): n is a, c, g, or t
  misc_feature (300)..(300): n is a, c, g, or t
  misc_feature (306)..(306): n is a, c, g, or t
  misc_feature (309)..(309): n is a, c, g, or t
  misc_feature (312)..(312): n is a, c, g, or t
  misc_feature (315)..(315): n is a, c, g, or t
  misc_feature (324)..(324): n is a, c, g, or t
  misc_feature (330)..(330): n is a, c, g, or t
  misc_feature (339)..(339): n is a, c, g, or t
  misc_feature (342)..(342): n is a, c, g, or t
  misc_feature (345)..(345): n is a, c, g, or t
  misc_feature (351)..(351): n is a, c, g, or t
  misc_feature (357)..(357): n is a, c, g, or t
  misc_feature (360)..(360): n is a, c, g, or t
  misc_feature (363)..(363): n is a, c, g, or t
  misc_feature (369)..(369): n is a, c, g, or t
  misc_feature (372)..(372): n is a, c, g, or t
  misc_feature (375)..(375): n is a, c, g, or t
  misc_feature (378)..(378): n is a, c, g, or t
  misc_feature (381)..(381): n is a, c, g, or t
  misc_feature (390)..(390): n is a, c, g, or t
  misc_feature (396)..(396): n is a, c, g, or t
  misc_feature (399)..(399): n is a, c, g, or t
  misc_feature (402)..(402): n is a, c, g, or t
gcngcngtnaarathwsnggngtnytnaargayggngcnggnaarccnathcaraaytgyacnathcarytnaargcnaarmgnaaywsnacnacngtnytngtnaayacngtngcnwsngaraayccngaygargcnggnmgntaywsnatggaygtngartayggncartaywsngtnathytnytngtngarggnttyccnccnwsncaygcnggnacnathacngtntaygarggnwsnmgnccnggnacnytnaaygayttyytnggngcnatgacngargargaygtnatgccngargcnytnmgnmgnttygargcnatggtngargargtngcnmgnaaygcngargcngcnwsncarwsngcngcngcngcnaaraarwsngaracngcngcn

SEQ ID NO: 756 - DNA, 402 bp, Artificial Sequence
  PfN-CNA50
  misc_feature (3)..(3): n is a, c, g, or t
  misc_feature (6)..(6): n is a, c, g, or t
  misc_feature (9)..(9): n is a, c, g, or t
  misc_feature (18)..(18): n is a, c, g, or t
  misc_feature (21)..(21): n is a, c, g, or t
  misc_feature (24)..(24): n is a, c, g, or t
  misc_feature (27)..(27): n is a, c, g, or t
  misc_feature (36)..(36): n is a, c, g, or t
  misc_feature (39)..(39): n is a, c, g, or t
  misc_feature (42)..(42): n is a, c, g, or t
  misc_feature (48)..(48): n is a, c, g, or t
  misc_feature (63)..(63): n is a, c, g, or t
  misc_feature (72)..(72): n is a, c, g, or t
  misc_feature (78)..(78): n is a, c, g, or t
  misc_feature (84)..(84): n is a, c, g, or t
  misc_feature (90)..(90): n is a, c, g, or t
  misc_feature (93)..(93): n is a, c, g, or t
  misc_feature (96)..(96): n is a, c, g, or t
  misc_feature (99)..(99): n is a, c, g, or t
  misc_feature (102)..(102): n is a, c, g, or t
  misc_feature (105)..(105): n is a, c, g, or t
  misc_feature (111)..(111): n is a, c, g, or t
  misc_feature (114)..(114): n is a, c, g, or t
  misc_feature (117)..(117): n is a, c, g, or t
  misc_feature (120)..(120): n is a, c, g, or t
  misc_feature (129)..(129): n is a, c, g, or t
  misc_feature (138)..(138): n is a, c, g, or t
  misc_feature (141)..(141): n is a, c, g, or t
  misc_feature (144)..(144): n is a, c, g, or t
  misc_feature (150)..(150): n is a, c, g, or t
  misc_feature (159)..(159): n is a, c, g, or t
  misc_feature (168)..(168): n is a, c, g, or t
  misc_feature (177)..(177): n is a, c, g, or t
  misc_feature (180)..(180): n is a, c, g, or t
  misc_feature (186)..(186): n is a, c, g, or t
  misc_feature (189)..(189): n is a, c, g, or t
  misc_feature (192)..(192): n is a, c, g, or t
  misc_feature (198)..(198): n is a, c, g, or t
  misc_feature (204)..(204): n is a, c, g, or t
  misc_feature (207)..(207): n is a, c, g, or t
  misc_feature (210)..(210): n is a, c, g, or t
  misc_feature (216)..(216): n is a, c, g, or t
  misc_feature (219)..(219): n is a, c, g, or t
  misc_feature (222)..(222): n is a, c, g, or t
  misc_feature (228)..(228): n is a, c, g, or t
  misc_feature (231)..(231): n is a, c, g, or t
  misc_feature (240)..(240): n is a, c, g, or t
  misc_feature (243)..(243): n is a, c, g, or t
  misc_feature (246)..(246): n is a, c, g, or t
  misc_feature (249)..(249): n is a, c, g, or t
  misc_feature (252)..(252): n is a, c, g, or t
  misc_feature (255)..(255): n is a, c, g, or t
  misc_feature (258)..(258): n is a, c, g, or t
  misc_feature (270)..(270): n is a, c, g, or t
  misc_feature (273)..(273): n is a, c, g, or t
  misc_feature (276)..(276): n is a, c, g, or t
  misc_feature (282)..(282): n is a, c, g, or t
  misc_feature (294)..(294): n is a, c, g, or t
  misc_feature (300)..(300): n is a, c, g, or t
  misc_feature (306)..(306): n is a, c, g, or t
  misc_feature (309)..(309): n is a, c, g, or t
  misc_feature (312)..(312): n is a, c, g, or t
  misc_feature (315)..(315): n is a, c, g, or t
  misc_feature (330)..(330): n is a, c, g, or t
  misc_feature (339)..(339): n is a, c, g, or t
  misc_feature (342)..(342): n is a, c, g, or t
  misc_feature (345)..(345): n is a, c, g, or t
  misc_feature (351)..(351): n is a, c, g, or t
  misc_feature (357)..(357): n is a, c, g, or t
  misc_feature (360)..(360): n is a, c, g, or t
  misc_feature (363)..(363): n is a, c, g, or t
  misc_feature (369)..(369): n is a, c, g, or t
  misc_feature (372)..(372): n is a, c, g, or t
  misc_feature (375)..(375): n is a, c, g, or t
  misc_feature (378)..(378): n is a, c, g, or t
  misc_feature (381)..(381): n is a, c, g, or t
  misc_feature (390)..(390): n is a, c, g, or t
  misc_feature (396)..(396): n is a, c, g, or t
  misc_feature (399)..(399): n is a, c, g, or t
  misc_feature (402)..(402): n is a, c, g, or t
gcngcngtnaarathwsnggngtnytnaargayggngcnggnaarccnathcaraaytgyacnathcarytnaargcnaarmgnaaywsnacnacngtnytngtnaayacngtngcnwsngaraayccngaygargcnggnmgntaywsnatggaygtngartayggncartaywsngtnathytnytngtngarggnttyccnccnwsncaygcnggnacnathacngtntaygarggnwsnmgnccnggnacnytnaaygayttyytnggngcnatgacngargaygaygtnatgccngargcnytnmgnmgnttygargaratggtngargargcngcnmgnaaygcngargcngcnwsncarwsngcngcngcngcnaaraarwsngaracngcngcn

SEQ ID NO: 757 - DNA, 402 bp, Artificial Sequence
  PfN-CNA51
  misc_feature (3)..(3): n is a, c, g, or t
  misc_feature (6)..(6): n is a, c, g, or t
  misc_feature (9)..(9): n is a, c, g, or t
  misc_feature (18)..(18): n is a, c, g, or t
  misc_feature (21)..(21): n is a, c, g, or t
  misc_feature (24)..(24): n is a, c, g, or t
  misc_feature (27)..(27): n is a, c, g, or t
  misc_feature (36)..(36): n is a, c, g, or t
  misc_feature (39)..(39): n is a, c, g, or t
  misc_feature (42)..(42): n is a, c, g, or t
  misc_feature (48)..(48): n is a, c, g, or t
  misc_feature (63)..(63): n is a, c, g, or t
  misc_feature (72)..(72): n is a, c, g, or t
  misc_feature (78)..(78): n is a, c, g, or t
  misc_feature (84)..(84): n is a, c, g, or t
  misc_feature (90)..(90): n is a, c, g, or t
  misc_feature (93)..(93): n is a, c, g, or t
  misc_feature (96)..(96): n is a, c, g, or t
  misc_feature (99)..(99): n is a, c, g, or t
  misc_feature (102)..(102): n is a, c, g, or t
  misc_feature (105)..(105): n is a, c, g, or t
  misc_feature (111)..(111): n is a, c, g, or t
  misc_feature (114)..(114): n is a, c, g, or t
  misc_feature (117)..(117): n is a, c, g, or t
  misc_feature (120)..(120): n is a, c, g, or t
  misc_feature (129)..(129): n is a, c, g, or t
  misc_feature (138)..(138): n is a, c, g, or t
  misc_feature (141)..(141): n is a, c, g, or t
  misc_feature (144)..(144): n is a, c, g, or t
  misc_feature (150)..(150): n is a, c, g, or t
  misc_feature (159)..(159): n is a, c, g, or t
  misc_feature (168)..(168): n is a, c, g, or t
  misc_feature (177)..(177): n is a, c, g, or t
  misc_feature (180)..(180): n is a, c, g, or t
  misc_feature (186)..(186): n is a, c, g, or t
  misc_feature (189)..(189): n is a, c, g, or t
  misc_feature (192)..(192): n is a, c, g, or t
  misc_feature (198)..(198): n is a, c, g, or t
  misc_feature (204)..(204): n is a, c, g, or t
  misc_feature (207)..(207): n is a, c, g, or t
  misc_feature (210)..(210): n is a, c, g, or t
  misc_feature (216)..(216): n is a, c, g, or t
  misc_feature (219)..(219): n is a, c, g, or t
  misc_feature (222)..(222): n is a, c, g, or t
  misc_feature (228)..(228): n is a, c, g, or t
  misc_feature (231)..(231): n is a, c, g, or t
  misc_feature (240)..(240): n is a, c, g, or t
  misc_feature (243)..(243): n is a, c, g, or t
  misc_feature (246)..(246): n is a, c, g, or t
  misc_feature (249)..(249): n is a, c, g, or t
  misc_feature (252)..(252): n is a, c, g, or t
  misc_feature (255)..(255): n is a, c, g, or t
  misc_feature (258)..(258): n is a, c, g, or t
  misc_feature (270)..(270): n is a, c, g, or t
  misc_feature (273)..(273): n is a, c, g, or t
  misc_feature (276)..(276): n is a, c, g, or t
  misc_feature (282)..(282): n is a, c, g, or t
  misc_feature (294)..(294): n is a, c, g, or t
  misc_feature (300)..(300): n is a, c, g, or t
  misc_feature (306)..(306): n is a, c, g, or t
  misc_feature (309)..(309): n is a, c, g, or t
  misc_feature (312)..(312): n is a, c, g, or t
  misc_feature (315)..(315): n is a, c, g, or t
  misc_feature (330)..(330): n is a, c, g, or t
  misc_feature (339)..(339): n is a, c, g, or t
  misc_feature (342)..(342): n is a, c, g, or t
  misc_feature (345)..(345): n is a, c, g, or t
  misc_feature (351)..(351): n is a, c, g, or t
  misc_feature (357)..(357): n is a, c, g, or t
  misc_feature (360)..(360): n is a, c, g, or t
  misc_feature (363)..(363): n is a, c, g, or t
  misc_feature (369)..(369): n is a, c, g, or t
  misc_feature (372)..(372): n is a, c, g, or t
  misc_feature (375)..(375): n is a, c, g, or t
  misc_feature (378)..(378): n is a, c, g, or t
  misc_feature (381)..(381): n is a, c, g, or t
  misc_feature (390)..(390): n is a, c, g, or t
  misc_feature (396)..(396): n is a, c, g, or t
  misc_feature (399)..(399): n is a, c, g, or t
  misc_feature (402)..(402): n is a, c, g, or t
gcngcngtnaarathwsnggngtnytnaargayggngcnggnaarccnathcaraaytgyacnathcarytnaargcnaarmgnaaywsnacnacngtnytngtnaayacngtngcnwsngaraayccngaygargtnggnmgntaywsnatggaygtngartayggncartaywsngtnathytnytngtngarggnttyccnccnwsncaygcnggnacnathacngtntaygarggnwsnmgnccnggnacnytnaaygayttyytnggngcnatgacngargaygaygtnatgccngargcnytnmgnmgnttygargaratggtngargargcngcnmgnaaygcngargcngcnwsncarwsngcngcngcngcnaaraarwsngaracngcngcn

SEQ ID NO: 758 - DNA, 402 bp, Artificial Sequence
  PfN-CNA52
  misc_feature (3)..(3): n is a, c, g, or t
  misc_feature (6)..(6): n is a, c, g, or t
  misc_feature (9)..(9): n is a, c, g, or t
  misc_feature (18)..(18): n is a, c, g, or t
  misc_feature (21)..(21): n is a, c, g, or t
  misc_feature (24)..(24): n is a, c, g, or t
  misc_feature (27)..(27): n is a, c, g, or t
  misc_feature (36)..(36): n is a, c, g, or t
  misc_feature (39)..(39): n is a, c, g, or t
  misc_feature (42)..(42): n is a, c, g, or t
  misc_feature (48)..(48): n is a, c, g, or t
  misc_feature (63)..(63): n is a, c, g, or t
  misc_feature (72)..(72): n is a, c, g, or t
  misc_feature (78)..(78): n is a, c, g, or t
  misc_feature (84)..(84): n is a, c, g, or t
  misc_feature (90)..(90): n is a, c, g, or t
  misc_feature (93)..(93): n is a, c, g, or t
  misc_feature (96)..(96): n is a, c, g, or t
  misc_feature (99)..(99): n is a, c, g, or t
  misc_feature (102)..(102): n is a, c, g, or t
  misc_feature (105)..(105): n is a, c, g, or t
  misc_feature (111)..(111): n is a, c, g, or t
  misc_feature (114)..(114): n is a, c, g, or t
  misc_feature (117)..(117): n is a, c, g, or t
  misc_feature (120)..(120): n is a, c, g, or t
  misc_feature (129)..(129): n is a, c, g, or t
  misc_feature (138)..(138): n is a, c, g, or t
  misc_feature (141)..(141): n is a, c, g, or t
  misc_feature (144)..(144): n is a, c, g, or t
  misc_feature (150)..(150): n is a, c, g, or t
  misc_feature (159)..(159): n is a, c, g, or t
  misc_feature (168)..(168): n is a, c, g, or t
  misc_feature (177)..(177): n is a, c, g, or t
  misc_feature (180)..(180): n is a, c, g, or t
  misc_feature (183)..(183): n is a, c, g, or t
  misc_feature (186)..(186): n is a, c, g, or t
  misc_feature (189)..(189): n is a, c, g, or t
  misc_feature (192)..(192): n is a, c, g, or t
  misc_feature (198)..(198): n is a, c, g, or t
  misc_feature (204)..(204): n is a, c, g, or t
  misc_feature (207)..(207): n is a, c, g, or t
  misc_feature (210)..(210): n is a, c, g, or t
  misc_feature (216)..(216): n is a, c, g, or t
  misc_feature (219)..(219): n is a, c, g, or t
  misc_feature (222)..(222): n is a, c, g, or t
  misc_feature (228)..(228): n is a, c, g, or t
  misc_feature (231)..(231): n is a, c, g, or t
  misc_feature (240)..(240): n is a, c, g, or t
  misc_feature (243)..(243): n is a, c, g, or t
  misc_feature (246)..(246): n is a, c, g, or t
  misc_feature (249)..(249): n is a, c, g, or t
  misc_feature (252)..(252): n is a, c, g, or t
  misc_feature (255)..(255): n is a, c, g, or t
  misc_feature (258)..(258): n is a, c, g, or t
  misc_feature (270)..(270): n is a, c, g, or t
  misc_feature (273)..(273): n is a, c, g, or t
  misc_feature (276)..(276): n is a, c, g, or t
  misc_feature (282)..(282): n is a, c, g, or t
  misc_feature (294)..(294): n is a, c, g, or t
  misc_feature (300)..(300): n is a, c, g, or t
  misc_feature (306)..(306): n is a, c, g, or t
  misc_feature (309)..(309): n is a, c, g, or t
  misc_feature (312)..(312): n is a, c, g, or t
  misc_feature (315)..(315): n is a, c, g, or t
  misc_feature (324)..(324): n is a, c, g, or t
  misc_feature (330)..(330): n is a, c, g, or t
  misc_feature (339)..(339): n is a, c, g, or t
  misc_feature (342)..(342): n is a, c, g, or t
  misc_feature (345)..(345): n is a, c, g, or t
  misc_feature (351)..(351): n is a, c, g, or t
  misc_feature (357)..(357): n is a, c, g, or t
  misc_feature (360)..(360): n is a, c, g, or t
  misc_feature (363)..(363): n is a, c, g, or t
  misc_feature (369)..(369): n is a, c, g, or t
  misc_feature (372)..(372): n is a, c, g, or t
  misc_feature (375)..(375): n is a, c, g, or t
  misc_feature (378)..(378): n is a, c, g, or t
  misc_feature (381)..(381): n is a, c, g, or t
  misc_feature (390)..(390): n is a, c, g, or t
  misc_feature (396)..(396): n is a, c, g, or t
  misc_feature (399)..(399): n is a, c, g, or t
  misc_feature (402)..(402): n is a, c, g, or t
gcngcngtnaarathwsnggngtnytnaargayggngcnggnaarccnathcaraaytgyacnathcarytnaargcnaarmgnaaywsnacnacngtnytngtnaayacngtngcnwsngaraayccngaygargcnggnmgntaywsnatggaygtngartayggncartaywsngtnacnytnytngtngarggnttyccnccnwsncaygcnggnacnathacngtntaygarggnwsnmgnccnggnacnytnaaygayttyytnggngcnatgacngargaygaygtnatgccngargcnytnmgnmgnttygargcnatggtngargargcngcnmgnaaygcngargcngcnwsncarwsngcngcngcngcnaaraarwsngaracngcngcn

SEQ ID NO: 759 - DNA, 399 bp, Artificial Sequence
  PfN-CNA53
  misc_feature (3)..(3): n is a, c, g, or t
  misc_feature (6)..(6): n is a, c, g, or t
  misc_feature (15)..(15): n is a, c, g, or t
  misc_feature (18)..(18): n is a, c, g, or t
  misc_feature (21)..(21): n is a, c, g, or t
  misc_feature (24)..(24): n is a, c, g, or t
  misc_feature (33)..(33): n is a, c, g, or t
  misc_feature (36)..(36): n is a, c, g, or t
  misc_feature (39)..(39): n is a, c, g, or t
  misc_feature (45)..(45): n is a, c, g, or t
  misc_feature (60)..(60): n is a, c, g, or t
  misc_feature (69)..(69): n is a, c, g, or t
  misc_feature (75)..(75): n is a, c, g, or t
  misc_feature (81)..(81): n is a, c, g, or t
  misc_feature (87)..(87): n is a, c, g, or t
  misc_feature (90)..(90): n is a, c, g, or t
  misc_feature (93)..(93): n is a, c, g, or t
  misc_feature (96)..(96): n is a, c, g, or t
  misc_feature (99)..(99): n is a, c, g, or t
  misc_feature (102)..(102): n is a, c, g, or t
  misc_feature (108)..(108): n is a, c, g, or t
  misc_feature (111)..(111): n is a, c, g, or t
  misc_feature (114)..(114): n is a, c, g, or t
  misc_feature (117)..(117): n is a, c, g, or t
  misc_feature (126)..(126): n is a, c, g, or t
  misc_feature (135)..(135): n is a, c, g, or t
  misc_feature (138)..(138): n is a, c, g, or t
  misc_feature (141)..(141): n is a, c, g, or t
  misc_feature (147)..(147): n is a, c, g, or t
  misc_feature (156)..(156): n is a, c, g, or t
  misc_feature (165)..(165): n is a, c, g, or t
  misc_feature (174)..(174): n is a, c, g, or t
  misc_feature (177)..(177): n is a, c, g, or t
  misc_feature (183)..(183): n is a, c, g, or t
  misc_feature (186)..(186): n is a, c, g, or t
  misc_feature (189)..(189): n is a, c, g, or t
  misc_feature (195)..(195): n is a, c, g, or t
  misc_feature (201)..(201): n is a, c, g, or t
  misc_feature (204)..(204): n is a, c, g, or t
  misc_feature (207)..(207): n is a, c, g, or t
  misc_feature (213)..(213): n is a, c, g, or t
  misc_feature (216)..(216): n is a, c, g, or t
  misc_feature (219)..(219): n is a, c, g, or t
  misc_feature (225)..(225): n is a, c, g, or t
  misc_feature (228)..(228): n is a, c, g, or t
  misc_feature (237)..(237): n is a, c, g, or t
  misc_feature (240)..(240): n is a, c, g, or t
  misc_feature (243)..(243): n is a, c, g, or t
  misc_feature (246)..(246): n is a, c, g, or t
  misc_feature (249)..(249): n is a, c, g, or t
  misc_feature (252)..(252): n is a, c, g, or t
  misc_feature (255)..(255): n is a, c, g, or t
  misc_feature (267)..(267): n is a, c, g, or t
  misc_feature (270)..(270): n is a, c, g, or t
  misc_feature (273)..(273): n is a, c, g, or t
  misc_feature (279)..(279): n is a, c, g, or t
  misc_feature (291)..(291): n is a, c, g, or t
  misc_feature (297)..(297): n is a, c, g, or t
  misc_feature (303)..(303): n is a, c, g, or t
  misc_feature (306)..(306): n is a, c, g, or t
  misc_feature (309)..(309): n is a, c, g, or t
  misc_feature (312)..(312): n is a, c, g, or t
  misc_feature (327)..(327): n is a, c, g, or t
  misc_feature (336)..(336): n is a, c, g, or t
  misc_feature (339)..(339): n is a, c, g, or t
  misc_feature (342)..(342): n is a, c, g, or t
  misc_feature (348)..(348): n is a, c, g, or t
  misc_feature (354)..(354): n is a, c, g, or t
  misc_feature (357)..(357): n is a, c, g, or t
  misc_feature (360)..(360): n is a, c, g, or t
  misc_feature (366)..(366): n is a, c, g, or t
  misc_feature (369)..(369): n is a, c, g, or t
  misc_feature (372)..(372): n is a, c, g, or t
  misc_feature (375)..(375): n is a, c, g, or t
  misc_feature (378)..(378): n is a, c, g, or t
  misc_feature (387)..(387): n is a, c, g, or t
  misc_feature (393)..(393): n is a, c, g, or t
  misc_feature (396)..(396): n is a, c, g, or t
  misc_feature (399)..(399): n is a, c, g, or t
gcngtncarathwsnggngtnytnaargayggngcnggnaarccnathcaraaytgyacnathcarytnaargcnaarmgnaaywsnacnacngtnytngtnaayacngtngcnwsngaraayccngaygargcnggnmgntaywsnatggaygtngartayggncartaywsngtnathytnytngtngarggnttyccnccnwsncaygcnggnacnathacngtntaygarggnwsnmgnccnggnacnytnaaygayttyytnggngcnatgacngargaygaygtnatgccngargcnytnmgnmgnttygargaratggtngargargcngcnmgnaaygcngargcngcnwsncarwsngcngcngcngcnaaraarwsngaracngcngcn

SEQ ID NO: 760 - DNA, 399 bp, Artificial Sequence
  PfN-CNA54
  misc_feature (3)..(3): n is a, c, g, or t
  misc_feature (6)..(6): n is a, c, g, or t
  misc_feature (15)..(15): n is a, c, g, or t
  misc_feature (18)..(18): n is a, c, g, or t
  misc_feature (21)..(21): n is a, c, g, or t
  misc_feature (24)..(24): n is a, c, g, or t
  misc_feature (33)..(33): n is a, c, g, or t
  misc_feature (36)..(36): n is a, c, g, or t
  misc_feature (39)..(39): n is a, c, g, or t
  misc_feature (45)..(45): n is a, c, g, or t
  misc_feature (48)..(48): n is a, c, g, or t
  misc_feature (60)..(60): n is a, c, g, or t
  misc_feature (66)..(66): n is a, c, g, or t
  misc_feature (69)..(69): n is a, c, g, or t
  misc_feature (75)..(75): n is a, c, g, or t
  misc_feature (78)..(78): n is a, c, g, or t
  misc_feature (81)..(81): n is a, c, g, or t
  misc_feature (84)..(84): n is a, c, g, or t
  misc_feature (87)..(87): n is a, c, g, or t
  misc_feature (90)..(90): n is a, c, g, or t
  misc_feature (93)..(93): n is a, c, g, or t
  misc_feature (96)..(96): n is a, c, g, or t
  misc_feature (99)..(99): n is a, c, g, or t
  misc_feature (102)..(102): n is a, c, g, or t
  misc_feature (108)..(108): n is a, c, g, or t
  misc_feature (111)..(111): n is a, c, g, or t
  misc_feature (114)..(114): n is a, c, g, or t
  misc_feature (117)..(117): n is a, c, g, or t
  misc_feature (126)..(126): n is a, c, g, or t
  misc_feature (135)..(135): n is a, c, g, or t
  misc_feature (138)..(138): n is a, c, g, or t
  misc_feature (141)..(141): n is a, c, g, or t
  misc_feature (147)..(147): n is a, c, g, or t
  misc_feature (156)..(156): n is a, c, g, or t
  misc_feature (165)..(165): n is a, c, g, or t
  misc_feature (174)..(174): n is a, c, g, or t
  misc_feature (177)..(177): n is a, c, g, or t
  misc_feature (180)..(180): n is a, c, g, or t
  misc_feature (183)..(183): n is a, c, g, or t
  misc_feature (186)..(186): n is a, c, g, or t
  misc_feature (189)..(189): n is a, c, g, or t
  misc_feature (195)..(195): n is a, c, g, or t
  misc_feature (201)..(201): n is a, c, g, or t
  misc_feature (204)..(204): n is a, c, g, or t
  misc_feature (207)..(207): n is a, c, g, or t
  misc_feature (213)..(213): n is a, c, g, or t
  misc_feature (216)..(216): n is a, c, g, or t
  misc_feature (219)..(219): n is a, c, g, or t
  misc_feature (225)..(225): n is a, c, g, or t
  misc_feature (228)..(228): n is a, c, g, or t
  misc_feature (237)..(237): n is a, c, g, or t
  misc_feature (240)..(240): n is a, c, g, or t
  misc_feature (243)..(243): n is a, c, g, or t
  misc_feature (246)..(246): n is a, c, g, or t
  misc_feature (249)..(249): n is a, c, g, or t
  misc_feature (252)..(252): n is a, c, g, or t
  misc_feature (255)..(255): n is a, c, g, or t
  misc_feature (267)..(267): n is a, c, g, or t
  misc_feature (270)..(270): n is a, c, g, or t
  misc_feature (273)..(273): n is a, c, g, or t
  misc_feature (279)..(279): n is a, c, g, or t
  misc_feature (291)..(291): n is a, c, g, or t
  misc_feature (294)..(294): n is a, c, g, or t
  misc_feature (297)..(297): n is a, c, g, or t
  misc_feature (303)..(303): n is a, c, g, or t
  misc_feature (306)..(306): n is a, c, g, or t
  misc_feature (309)..(309): n is a, c, g, or t
  misc_feature (312)..(312): n is a, c, g, or t
  misc_feature (327)..(327): n is a, c, g, or t
  misc_feature (336)..(336): n is a, c, g, or t
  misc_feature (339)..(339): n is a, c, g, or t
  misc_feature (342)..(342): n is a, c, g, or t
  misc_feature (348)..(348): n is a, c, g, or t
  misc_feature (351)..(351): n is a, c, g, or t
  misc_feature (354)..(354): n is a, c, g, or t
  misc_feature (357)..(357): n is a, c, g, or t
  misc_feature (360)..(360): n is a, c, g, or t
  misc_feature (369)..(369): n is a, c, g, or t
  misc_feature (372)..(372): n is a, c, g, or t
  misc_feature (375)..(375): n is a, c, g, or t
  misc_feature (378)..(378): n is a, c, g, or t
  misc_feature (387)..(387): n is a, c, g, or t
  misc_feature (390)..(390): n is a, c, g, or t
  misc_feature (393)..(393): n is a, c, g, or t
  misc_feature (399)..(399): n is a, c, g, or t
acngtnaarathwsnggngtnytnaargayggnacnggnaarccngtncaraaytgyacnathgtnytnaargcnmgnmgnacnwsnwsnacngtngtngtnaayacngtngcnwsngaraayccngaygargcnggnmgntaywsnatggaygtngarcayggncartaywsngtnacnytnytngtngarggnttyccnccnwsncaygcnggnacnathacngtntaygarggnwsnmgnccnggnacnytnaaygayttyytnggngcnatgacngargaygaygtnmgnccngargcnytnmgnmgnttygarcaratggtngargargtnwsnmgnaaygcnwsngcngtngcncaraayacngcngcngcnaaraarwsngcnwsngaygcn

SEQ ID NO: 761 - DNA, 399 bp, Artificial Sequence
  PfN-CNA55
  misc_feature (3)..(3): n is a, c, g, or t
  misc_feature (6)..(6): n is a, c, g, or t
  misc_feature (15)..(15): n is a, c, g, or t
  misc_feature (18)..(18): n is a, c, g, or t
  misc_feature (21)..(21): n is a, c, g, or t
  misc_feature (24)..(24): n is a, c, g, or t
  misc_feature (33)..(33): n is a, c, g, or t
  misc_feature (36)..(36): n is a, c, g, or t
  misc_feature (39)..(39): n is a, c, g, or t
  misc_feature (45)..(45): n is a, c, g, or t
  misc_feature (48)..(48): n is a, c, g, or t
  misc_feature (60)..(60): n is a, c, g, or t
  misc_feature (69)..(69): n is a, c, g, or t
  misc_feature (75)..(75): n is a, c, g, or t
  misc_feature (81)..(81): n is a, c, g, or t
  misc_feature (87)..(87): n is a, c, g, or t
  misc_feature (90)..(90): n is a, c, g, or t
  misc_feature (93)..(93): n is a, c, g, or t
  misc_feature (96)..(96): n is a, c, g, or t
  misc_feature (99)..(99): n is a, c, g, or t
  misc_feature (102)..(102): n is a, c, g, or t
  misc_feature (108)..(108): n is a, c, g, or t
  misc_feature (111)..(111): n is a, c, g, or t
  misc_feature (114)..(114): n is a, c, g, or t
  misc_feature (117)..(117): n is a, c, g, or t
  misc_feature (126)..(126): n is a, c, g, or t
  misc_feature (135)..(135): n is a, c, g, or t
  misc_feature (138)..(138): n is a, c, g, or t
  misc_feature (141)..(141): n is a, c, g, or t
  misc_feature (147)..(147): n is a, c, g, or t
  misc_feature (156)..(156): n is a, c, g, or t
  misc_feature (165)..(165): n is a, c, g, or t
  misc_feature (174)..(174): n is a, c, g, or t
  misc_feature (177)..(177): n is a, c, g, or t
  misc_feature (180)..(180): n is a, c, g, or t
  misc_feature (183)..(183): n is a, c, g, or t
  misc_feature (186)..(186): n is a, c, g, or t
  misc_feature (189)..(189): n is a, c, g, or t
  misc_feature (195)..(195): n is a, c, g, or t
  misc_feature (201)..(201): n is a, c, g, or t
  misc_feature (204)..(204): n is a, c, g, or t
  misc_feature (207)..(207): n is a, c, g, or t
  misc_feature (213)..(213): n is a, c, g, or t
  misc_feature (216)..(216): n is a, c, g, or t
  misc_feature (219)..(219): n is a, c, g, or t
  misc_feature (225)..(225): n is a, c, g, or t
  misc_feature (228)..(228): n is a, c, g, or t
  misc_feature (237)..(237): n is a, c, g, or t
  misc_feature (240)..(240): n is a, c, g, or t
  misc_feature (243)..(243): n is a, c, g, or t
  misc_feature (246)..(246): n is a, c, g, or t
  misc_feature (249)..(249): n is a, c, g, or t
  misc_feature (252)..(252): n is a, c, g, or t
  misc_feature (255)..(255): n is a, c, g, or t
  misc_feature (267)..(267): n is a, c, g, or t
  misc_feature (270)..(270): n is a, c, g, or t
  misc_feature (273)..(273): n is a, c, g, or t
  misc_feature (279)..(279): n is a, c, g, or t
  misc_feature (291)..(291): n is a, c, g, or t
  misc_feature (297)..(297): n is a, c, g, or t
  misc_feature (303)..(303): n is a, c, g, or t
  misc_feature (306)..(306): n is a, c, g, or t
  misc_feature (309)..(309): n is a, c, g, or t
  misc_feature (312)..(312): n is a, c, g, or t
  misc_feature (321)..(321): n is a, c, g, or t
  misc_feature (327)..(327): n is a, c, g, or t
  misc_feature (336)..(336): n is a, c, g, or t
  misc_feature (339)..(339): n is a, c, g, or t
  misc_feature (342)..(342): n is a, c, g, or t
  misc_feature (348)..(348): n is a, c, g, or t
  misc_feature (351)..(351): n is a, c, g, or t
  misc_feature (354)..(354): n is a, c, g, or t
  misc_feature (357)..(357): n is a, c, g, or t
  misc_feature (360)..(360): n is a, c, g, or t
  misc_feature (369)..(369): n is a, c, g, or t
  misc_feature (372)..(372): n is a, c, g, or t
  misc_feature (375)..(375): n is a, c, g, or t
  misc_feature (378)..(378): n is a, c, g, or t
  misc_feature (387)..(387): n is a, c, g, or t
  misc_feature (390)..(390): n is a, c, g, or t
  misc_feature (393)..(393): n is a, c, g, or t
  misc_feature (399)..(399): n is a, c, g, or t
gcngtnaarathwsnggngtnytnaargayggnacnggnaarccngtncaraaytgyacnathcarytnaargcnaarmgnaaywsnacnacngtngtngtnaayacngtngcnwsngaraayccngaygargcnggnmgntaywsnatgaaygtngartayggncartaywsngtnacnytnytngtngarggnttyccnccnwsncaygcnggnacnathacngtntgygarggnwsnmgnccnggnacnytnaaygayttyytnggngcnatgacngargaygaygtntgyccngargcnytnmgnmgnttygarytnatggtngargargtngcnmgnaaygcnwsngcngtngcncaraayacngcngcngcnaaraarwsngcnmgngaygcn

SEQ ID NO: 762 - DNA, 399 bp, Artificial Sequence
  PfN-CNA56
  misc_feature (3)..(3): n is a, c, g, or t
  misc_feature (6)..(6): n is a, c, g, or t
  misc_feature (15)..(15): n is a, c, g, or t
  misc_feature (18)..(18): n is a, c, g, or t
  misc_feature (21)..(21): n is a, c, g, or t
  misc_feature (24)..(24): n is a, c, g, or t
  misc_feature (33)..(33): n is a, c, g, or t
  misc_feature (36)..(36): n is a, c, g, or t
  misc_feature (39)..(39): n is a, c, g, or t
  misc_feature (45)..(45): n is a, c, g, or t
  misc_feature (48)..(48): n is a, c, g, or t
  misc_feature (60)..(60): n is a, c, g, or t
  misc_feature (69)..(69): n is a, c, g, or t
  misc_feature (75)..(75): n is a, c, g, or t
  misc_feature (81)..(81): n is a, c, g, or t
  misc_feature (87)..(87): n is a, c, g, or t
  misc_feature (90)..(90): n is a, c, g, or t
  misc_feature (93)..(93): n is a, c, g, or t
  misc_feature (96)..(96): n is a, c, g, or t
  misc_feature (99)..(99): n is a, c, g, or t
  misc_feature (102)..(102): n is a, c, g, or t
  misc_feature (108)..(108): n is a, c, g, or t
  misc_feature (111)..(111): n is a, c, g, or t
  misc_feature (114)..(114): n is a, c, g, or t
  misc_feature (117)..(117): n is a, c, g, or t
  misc_feature (126)..(126): n is a, c, g, or t
  misc_feature (135)..(135): n is a, c, g, or t
  misc_feature (138)..(138): n is a, c, g, or t
  misc_feature (141)..(141): n is a, c, g, or t
  misc_feature (147)..(147): n is a, c, g, or t
  misc_feature (156)..(156): n is a, c, g, or t
  misc_feature (165)..(165): n is a, c, g, or t
  misc_feature (174)..(174): n is a, c, g, or t
  misc_feature (177)..(177): n is a, c, g, or t
  misc_feature (183)..(183): n is a, c, g, or t
  misc_feature (186)..(186): n is a, c, g, or t
  misc_feature (189)..(189): n is a, c, g, or t
  misc_feature (195)..(195): n is a, c, g, or t
  misc_feature (201)..(201): n is a, c, g, or t
  misc_feature (204)..(204): n is a, c, g, or t
  misc_feature (207)..(207): n is a, c, g, or t
  misc_feature (213)..(213): n is a, c, g, or t
  misc_feature (216)..(216): n is a, c, g, or t
  misc_feature (219)..(219): n is a, c, g, or t
  misc_feature (225)..(225): n is a, c, g, or t
  misc_feature (228)..(228): n is a, c, g, or t
  misc_feature (240)..(240): n is a, c, g, or t
  misc_feature (246)..(246): n is a, c, g, or t
  misc_feature (249)..(249): n is a, c, g, or t
  misc_feature (252)..(252): n is a, c, g, or t
  misc_feature (255)..(255): n is a, c, g, or t
  misc_feature (267)..(267): n is a, c, g, or t
  misc_feature (270)..(270): n is a, c, g, or t
  misc_feature (273)..(273): n is a, c, g, or t
  misc_feature (279)..(279): n is a, c, g, or t
  misc_feature (291)..(291): n is a, c, g, or t
  misc_feature (294)..(294): n is a, c, g, or t
  misc_feature (297)..(297): n is a, c, g, or t
  misc_feature (303)..(303): n is a, c, g, or t
  misc_feature (306)..(306): n is a, c, g, or t
  misc_feature (309)..(309): n is a, c, g, or t
  misc_feature (312)..(312): n is a, c, g, or t
  misc_feature (327)..(327): n is a, c, g, or t
  misc_feature (336)..(336): n is a, c, g, or t
  misc_feature (339)..(339): n is a, c, g, or t
  misc_feature (342)..(342): n is a, c, g, or t
  misc_feature (348)..(348): n is a, c, g, or t
  misc_feature (351)..(351): n is a, c, g, or t
  misc_feature (354)..(354): n is a, c, g, or t
  misc_feature (357)..(357): n is a, c, g, or t
  misc_feature (360)..(360): n is a, c, g, or t
  misc_feature (369)..(369): n is a, c, g, or t
  misc_feature (372)..(372): n is a, c, g, or t
  misc_feature (375)..(375): n is a, c, g, or t
  misc_feature (378)..(378): n is a, c, g, or t
  misc_feature (387)..(387): n is a, c, g, or t
  misc_feature (390)..(390): n is a, c, g, or t
  misc_feature (393)..(393): n is a, c, g, or t
  misc_feature (399)..(399): n is a, c, g, or t
gcngtnaarathwsnggngtnytnaargayggnacnggnaarccngtncaraaytgyacnathcarytnaargcnaarmgnaaywsnacnacngtngtngtnaayacnytngcnwsngaraayccngaygargcnggnmgntaywsnatggaygtngartayggncartaywsngtnathytnytngtngarggnttyccnccnwsncaygcnggnacnathacngtntaygargaywsncarccnggnacnytnaaygayttyytnggngcnatgacngargaygaygcnmgnccngargcnytnmgnmgnttygarcaratggtngargargtngcnmgnaaygcnwsngtngtngcncaraayacngcngcngcnaaraarwsngcnwsngaygcn

SEQ ID NO: 763 - DNA, 399 bp, Artificial Sequence
  PfN-CNA57
  misc_feature (3)..(3): n is a, c, g, or t
  misc_feature (6)..(6): n is a, c, g, or t
  misc_feature (15)..(15): n is a, c, g, or t
  misc_feature (18)..(18): n is a, c, g, or t
  misc_feature (21)..(21): n is a, c, g, or t
  misc_feature (24)..(24): n is a, c, g, or t
  misc_feature (33)..(33): n is a, c, g, or t
  misc_feature (36)..(36): n is a, c, g, or t
  misc_feature (39)..(39): n is a, c, g, or t
  misc_feature (45)..(45): n is a, c, g, or t
  misc_feature (48)..(48): n is a, c, g, or t
  misc_feature (60)..(60): n is a, c, g, or t
  misc_feature (69)..(69): n is a, c, g, or t
  misc_feature (75)..(75): n is a, c, g, or t
  misc_feature (81)..(81): n is a, c, g, or t
  misc_feature (87)..(87): n is a, c, g, or t
  misc_feature (90)..(90): n is a, c, g, or t
  misc_feature (93)..(93): n is a, c, g, or t
  misc_feature (96)..(96): n is a, c, g, or t
  misc_feature (99)..(99): n is a, c, g, or t
  misc_feature (102)..(102): n is a, c, g, or t
  misc_feature (108)..(108): n is a, c, g, or t
  misc_feature (111)..(111): n is a, c, g, or t
  misc_feature (114)..(114): n is a, c, g, or t
  misc_feature (117)..(117): n is a, c, g, or t
  misc_feature (126)..(126): n is a, c, g, or t
  misc_feature (135)..(135): n is a, c, g, or t
  misc_feature (138)..(138): n is a, c, g, or t
  misc_feature (141)..(141): n is a, c, g, or t
  misc_feature (147)..(147): n is a, c, g, or t
  misc_feature (156)..(156): n is a, c, g, or t
  misc_feature (165)..(165): n is a, c, g, or t
  misc_feature (174)..(174): n is a, c, g, or t
  misc_feature (177)..(177): n is a, c, g, or t
  misc_feature (183)..(183): n is a, c, g, or t
  misc_feature (189)..(189): n is a, c, g, or t
  misc_feature (195)..(195): n is a, c, g, or t
  misc_feature (201)..(201): n is a, c, g, or t
  misc_feature (204)..(204): n is a, c, g, or t
  misc_feature (207)..(207): n is a, c, g, or t
  misc_feature (213)..(213): n is a, c, g, or t
  misc_feature (216)..(216): n is a, c, g, or t
  misc_feature (219)..(219): n is a, c, g, or t
  misc_feature (225)..(225): n is a, c, g, or t
  misc_feature (228)..(228): n is a, c, g, or t
  misc_feature (240)..(240): n is a, c, g, or t
  misc_feature (246)..(246): n is a, c, g, or t
  misc_feature (249)..(249): n is a, c, g, or t
  misc_feature (252)..(252): n is a, c, g, or t
  misc_feature (255)..(255): n is a, c, g, or t
  misc_feature (267)..(267): n is a, c, g, or t
  misc_feature (270)..(270): n is a, c, g, or t
  misc_feature (273)..(273): n is a, c, g, or t
  misc_feature (279)..(279): n is a, c, g, or t
  misc_feature (291)..(291): n is a, c, g, or t
  misc_feature (294)..(294): n is a, c, g, or t
  misc_feature (297)..(297): n is a, c, g, or t
  misc_feature (303)..(303): n is a, c, g, or t
  misc_feature (306)..(306): n is a, c, g, or t
  misc_feature (309)..(309): n is a, c, g, or t
  misc_feature (312)..(312): n is a, c, g, or t
  misc_feature (321)..(321): n is a, c, g, or t
  misc_feature (327)..(327): n is a, c, g, or t
  misc_feature (336)..(336): n is a, c, g, or t
  misc_feature (339)..(339): n is a, c, g, or t
  misc_feature (342)..(342): n is a, c, g, or t
  misc_feature (348)..(348): n is a, c, g, or t
  misc_feature (351)..(351): n is a, c, g, or t
  misc_feature (354)..(354): n is a, c, g, or t
  misc_feature (357)..(357): n is a, c, g, or t
  misc_feature (360)..(360): n is a, c, g, or t
  misc_feature (369)..(369): n is a, c, g, or t
  misc_feature (372)..(372): n is a, c, g, or t
  misc_feature (375)..(375): n is a, c, g, or t
  misc_feature (378)..(378): n is a, c, g, or t
  misc_feature (387)..(387): n is a, c, g, or t
  misc_feature (390)..(390): n is a, c, g, or t
  misc_feature (393)..(393): n is a, c, g, or t
  misc_feature (399)..(399): n is a, c, g, or t
gcngtnaarathwsnggngtnytnaargayggnacnggnaarccngtncaraaytgyacnathcarytnaargcnaarmgnaaywsnacnacngtngtngtnaayacnytngcnwsngaraayccngaygargcnggnmgntaywsnatggaygtngartayggncartaywsngtnathytnatggtngarggnttyccnccnwsncaygcnggnacnathacngtntaygargaywsnaarccnggnacnytnaaygayttyytnggngcnatgacngargaygaygcnmgnccngargcnytnmgnmgnttygarytnatggtngargargtngcnmgnaaygcnwsngtngtngcncaraayacngcngcngcnaaraarwsngcnwsngaygcn

SEQ ID NO: 764 - DNA, 399 bp, Artificial Sequence
  PfN-CNA58
  misc_feature (3)..(3): n is a, c, g, or t
  misc_feature (6)..(6): n is a, c, g, or t
  misc_feature (15)..(15): n is a, c, g, or t
  misc_feature (18)..(18): n is a, c, g, or t
  misc_feature (21)..(21): n is a, c, g, or t
  misc_feature (24)..(24): n is a, c, g, or t
  misc_feature (33)..(33): n is a, c, g, or t
  misc_feature (36)..(36): n is a, c, g, or t
  misc_feature (39)..(39): n is a, c, g, or t
  misc_feature (45)..(45): n is a, c, g, or t
  misc_feature (48)..(48): n is a, c, g, or t
  misc_feature (60)..(60): n is a, c, g, or t
  misc_feature (69)..(69): n is a, c, g, or t
  misc_feature (75)..(75): n is a, c, g, or t
  misc_feature (81)..(81): n is a, c, g, or t
  misc_feature (87)..(87): n is a, c, g, or t
  misc_feature (90)..(90): n is a, c, g, or t
  misc_feature (93)..(93): n is a, c, g, or t
  misc_feature (96)..(96): n is a, c, g, or t
  misc_feature (99)..(99): n is a, c, g, or t
  misc_feature (102)..(102): n is a, c, g, or t
  misc_feature (108)..(108): n is a, c, g, or t
  misc_feature (111)..(111): n is a, c, g, or t
  misc_feature (114)..(114): n is a, c, g, or t
  misc_feature (117)..(117): n is a, c, g, or t
  misc_feature (126)..(126): n is a, c, g, or t
  misc_feature (135)..(135): n is a, c, g, or t
  misc_feature (138)..(138): n is a, c, g, or t
  misc_feature (141)..(141): n is a, c, g, or t
  misc_feature (147)..(147): n is a, c, g, or t
  misc_feature (156)..(156): n is a, c, g, or t
  misc_feature (165)..(165): n is a, c, g, or t
  misc_feature (174)..(174): n is a, c, g, or t
  misc_feature (177)..(177): n is a, c, g, or t
  misc_feature (183)..(183): n is a, c, g, or t
  misc_feature (186)..(186): n is a, c, g, or t
  misc_feature (189)..(189): n is a, c, g, or t
  misc_feature (195)..(195): n is a, c, g, or t
  misc_feature (201)..(201): n is a, c, g, or t
  misc_feature (204)..(204): n is a, c, g, or t
  misc_feature (207)..(207): n is a, c, g, or t
  misc_feature (213)..(213): n is a, c, g, or t
  misc_feature (216)..(216): n is a, c, g, or t
  misc_feature (219)..(219): n is a, c, g, or t
  misc_feature (225)..(225): n is a, c, g, or t
  misc_feature (228)..(228): n is a, c, g, or t
  misc_feature (240)..(240): n is a, c, g, or t
  misc_feature (243)..(243): n is a, c, g, or t
  misc_feature (246)..(246): n is a, c, g, or t
  misc_feature (249)..(249): n is a, c, g, or t
  misc_feature (252)..(252): n is a, c, g, or t
  misc_feature (255)..(255): n is a, c, g, or t
  misc_feature (267)..(267): n is a, c, g, or t
  misc_feature (270)..(270): n is a, c, g, or t
  misc_feature (273)..(273): n is a, c, g, or t
  misc_feature (279)..(279): n is a, c, g, or t
  misc_feature (291)..(291): n is a, c, g, or t
  misc_feature (294)..(294): n is a, c, g, or t
  misc_feature (297)..(297): n is a, c, g, or t
  misc_feature (303)..(303): n is a, c, g, or t
  misc_feature (306)..(306): n is a, c, g, or t
  misc_feature (309)..(309): n is a, c, g, or t
  misc_feature (312)..(312): n is a, c, g, or t
  misc_feature (321)..(321): n is a, c, g, or t
  misc_feature (327)..(327): n is a, c, g, or t
  misc_feature (336)..(336): n is a, c, g, or t
  misc_feature (339)..(339): n is a, c, g, or t
  misc_feature (342)..(342): n is a, c, g, or t
  misc_feature (348)..(348): n is a, c, g, or t
  misc_feature (351)..(351): n is a, c, g, or t
  misc_feature (354)..(354): n is a, c, g, or t
  misc_feature (357)..(357): n is a, c, g, or t
  misc_feature (360)..(360): n is a, c, g, or t
  misc_feature (369)..(369): n is a, c, g, or t
  misc_feature (372)..(372): n is a, c, g, or t
  misc_feature (375)..(375): n is a, c, g, or t
  misc_feature (378)..(378): n is a, c, g, or t
  misc_feature (387)..(387): n is a, c, g, or t
  misc_feature (390)..(390): n is a, c, g, or t
  misc_feature (393)..(393): n is a, c, g, or t
  misc_feature (399)..(399): n is a, c, g, or t
gcngtnaarathwsnggngtnytnaargayggnacnggnaarccngtncaraaytgyacnathcarytnaargcnaarmgnaaywsnacnacngtngtngtnaayacnytngcnwsngaraayccngaygargcnggnmgntaywsnatggaygtngartayggncartaywsngtnathytnytngtngarggnttyccnccnwsncaygcnggnacnathacngtntaygargaywsnmgnccnggnacnytnaaygayttyytnggngcnatgacngargaygaygcnmgnccngargcnytnmgnmgnttygarytnatggtngargargtngcnmgnaaygcnwsngcngtngcncaraayacngcngcngcnaaraarwsngcnwsngaygcn

SEQ ID NO: 765 - DNA, 399 bp, Artificial Sequence
  PfN-CNA59
  misc_feature (3)..(3): n is a, c, g, or t
  misc_feature (6)..(6): n is a, c, g, or t
  misc_feature (15)..(15): n is a, c, g, or t
  misc_feature (18)..(18): n is a, c, g, or t
  misc_feature (21)..(21): n is a, c, g, or t
  misc_feature (24)..(24): n is a, c, g, or t
  misc_feature (33)..(33): n is a, c, g, or t
  misc_feature (36)..(36): n is a, c, g, or t
  misc_feature (39)..(39): n is a, c, g, or t
  misc_feature (45)..(45): n is a, c, g, or t
  misc_feature (48)..(48): n is a, c, g, or t
  misc_feature (60)..(60): n is a, c, g, or t
  misc_feature (69)..(69): n is a, c, g, or t
  misc_feature (75)..(75): n is a, c, g, or t
  misc_feature (81)..(81): n is a, c, g, or t
  misc_feature (87)..(87): n is a, c, g, or t
  misc_feature (90)..(90): n is a, c, g, or t
  misc_feature (93)..(93): n is a, c, g, or t
  misc_feature (96)..(96): n is a, c, g, or t
  misc_feature (99)..(99): n is a, c, g, or t
  misc_feature (102)..(102): n is a, c, g, or t
  misc_feature (108)..(108): n is a, c, g, or t
  misc_feature (111)..(111): n is a, c, g, or t
  misc_feature (114)..(114): n is a, c, g, or t
  misc_feature (117)..(117): n is a, c, g, or t
  misc_feature (126)..(126): n is a, c, g, or t
  misc_feature (135)..(135): n is a, c, g, or t
  misc_feature (138)..(138): n is a, c, g, or t
  misc_feature (141)..(141): n is a, c, g, or t
  misc_feature (147)..(147): n is a, c, g, or t
  misc_feature (156)..(156): n is a, c, g, or t
  misc_feature (165)..(165): n is a, c, g, or t
  misc_feature (174)..(174): n is a, c, g, or t
  misc_feature (177)..(177): n is a, c, g, or t
  misc_feature (183)..(183): n is a, c, g, or t
  misc_feature (186)..(186): n is a, c, g, or t
  misc_feature (189)..(189): n is a, c, g, or t
  misc_feature (195)..(195): n is a, c, g, or t
  misc_feature (201)..(201): n is a, c, g, or t
  misc_feature (204)..(204): n is a, c, g, or t
  misc_feature (207)..(207): n is a, c, g, or t
  misc_feature (213)..(213): n is a, c, g, or t
  misc_feature (216)..(216): n is a, c, g, or t
  misc_feature (219)..(219): n is a, c, g, or t
  misc_feature (225)..(225): n is a, c, g, or t
  misc_feature (228)..(228): n is a, c, g, or t
  misc_feature (240)..(240): n is a, c, g, or t
  misc_feature (243)..(243): n is a, c, g, or t
  misc_feature (246)..(246): n is a, c, g, or t
  misc_feature (249)..(249): n is a, c, g, or t
  misc_feature (252)..(252): n is a, c, g, or t
  misc_feature (255)..(255): n is a, c, g, or t
  misc_feature (267)..(267): n is a, c, g, or t
  misc_feature (270)..(270): n is a, c, g, or t
  misc_feature (273)..(273): n is a, c, g, or t
  misc_feature (279)..(279): n is a, c, g, or t
  misc_feature (291)..(291): n is a, c, g, or t
  misc_feature (294)..(294): n is a, c, g, or t
  misc_feature (297)..(297): n is a, c, g, or t
  misc_feature (303)..(303): n is a, c, g, or t
  misc_feature (306)..(306): n is a, c, g, or t
  misc_feature (309)..(309): n is a, c, g, or t
  misc_feature (312)..(312): n is a, c, g, or t
  misc_feature (321)..(321): n is a, c, g, or t
  misc_feature (327)..(327): n is a, c, g, or t
  misc_feature (336)..(336): n is a, c, g, or t
  misc_feature (339)..(339): n is a, c, g, or t
  misc_feature (342)..(342): n is a, c, g, or t
  misc_feature (348)..(348): n is a, c, g, or t
  misc_feature (351)..(351): n is a, c, g, or t
  misc_feature (354)..(354): n is a, c, g, or t
  misc_feature (357)..(357): n is a, c, g, or t
  misc_feature (360)..(360): n is a, c, g, or t
  misc_feature (369)..(369): n is a, c, g, or t
  misc_feature (372)..(372): n is a, c, g, or t
  misc_feature (375)..(375): n is a, c, g, or t
  misc_feature (378)..(378): n is a, c, g, or t
  misc_feature (387)..(387): n is a, c, g, or t
  misc_feature (390)..(390): n is a, c, g, or t
  misc_feature (393)..(393): n is a, c, g, or t
  misc_feature (399)..(399): n is a, c, g, or t
gcngtnaarathwsnggngtnytnaargayggnacnggnaarccngtncaraaytgyacnathcarytnaargcnaarmgnaaywsnacnacngtngtngtnaayacnytngcnwsngaraayccngaygargcnggnmgntaywsnatggaygtngartayggncartaywsngtnathytnytngtngarggnttyccnccnwsncaygcnggnacnathacngtntaygargaywsnmgnccnggnacnytnaaygayttyytnggngcnatgacngargaygaygcnmgnccngargcnytnmgnmgnttygarytnatggtngargargtnacnmgnaaygcnwsngcngtngcncaraayacngcngcngcnaaraarwsngcnwsngaygcn

SEQ ID NO: 766 - DNA, 399 bp, Artificial Sequence
  PfN-CNA60
  misc_feature (3)..(3): n is a, c, g, or t
  misc_feature (6)..(6): n is a, c, g, or t
  misc_feature (15)..(15): n is a, c, g, or t
  misc_feature (18)..(18): n is a, c, g, or t
  misc_feature (21)..(21): n is a, c, g, or t
  misc_feature (24)..(24): n is a, c, g, or t
  misc_feature (33)..(33): n is a, c, g, or t
  misc_feature (36)..(36): n is a, c, g, or t
  misc_feature (39)..(39): n is a, c, g, or t
  misc_feature (45)..(45): n is a, c, g, or t
  misc_feature (48)..(48): n is a, c, g, or t
  misc_feature (60)..(60): n is a, c, g, or t
  misc_feature (69)..(69): n is a, c, g, or t
  misc_feature (75)..(75): n is a, c, g, or t
  misc_feature (81)..(81): n is a, c, g, or t
  misc_feature (87)..(87): n is a, c, g, or t
  misc_feature (90)..(90): n is a, c, g, or t
  misc_feature (93)..(93): n is a, c, g, or t
  misc_feature (96)..(96): n is a, c, g, or t
  misc_feature (99)..(99): n is a, c, g, or t
  misc_feature (102)..(102): n is a, c, g, or t
  misc_feature (108)..(108): n is a, c, g, or t
  misc_feature (111)..(111): n is a, c, g, or t
  misc_feature (114)..(114): n is a, c, g, or t
  misc_feature (117)..(117): n is a, c, g, or t
  misc_feature (126)..(126): n is a, c, g, or t
  misc_feature (135)..(135): n is a, c, g, or t
  misc_feature (138)..(138): n is a, c, g, or t
  misc_feature (141)..(141): n is a, c, g, or t
  misc_feature (147)..(147): n is a, c, g, or t
  misc_feature (156)..(156): n is a, c, g, or t
  misc_feature (165)..(165): n is a, c, g, or t
  misc_feature (174)..(174): n is a, c, g, or t
  misc_feature (177)..(177): n is a, c, g, or t
  misc_feature (183)..(183): n is a, c, g, or t
  misc_feature (186)..(186): n is a, c, g, or t
  misc_feature (189)..(189): n is a, c, g, or t
  misc_feature (195)..(195): n is a, c, g, or t
  misc_feature (201)..(201): n is a, c, g, or t
  misc_feature (204)..(204): n is a, c, g, or t
  misc_feature (207)..(207): n is a, c, g, or t
  misc_feature (213)..(213): n is a, c, g, or t
  misc_feature (216)..(216): n is a, c, g, or t
  misc_feature (219)..(219): n is a, c, g, or t
  misc_feature (225)..(225): n is a, c, g, or t
  misc_feature (228)..(228): n is a, c, g, or t
  misc_feature (240)..(240): n is a, c, g, or t
  misc_feature (243)..(243): n is a, c, g, or t
  misc_feature (246)..(246): n is a, c, g, or t
  misc_feature (249)..(249): n is a, c, g, or t
  misc_feature (252)..(252): n is a, c, g, or t
  misc_feature (255)..(255): n is a, c, g, or t
  misc_feature (267)..(267): n is a, c, g, or t
  misc_feature (270)..(270): n is a, c, g, or t
  misc_feature (273)..(273): n is a, c, g, or t
  misc_feature (279)..(279): n is a, c, g, or t
  misc_feature (291)..(291): n is a, c, g, or t
  misc_feature (294)..(294): n is a, c, g, or t
  misc_feature (297)..(297): n is a, c, g, or t
  misc_feature (303)..(303): n is a, c, g, or t
  misc_feature (306)..(306): n is a, c, g, or t
  misc_feature (309)..(309): n is a, c, g, or t
  misc_feature (312)..(312): n is a, c, g, or t
  misc_feature (321)..(321): n is a, c, g, or t
  misc_feature (327)..(327): n is a, c, g, or t
  misc_feature (336)..(336): n is a, c, g, or t
  misc_feature (339)..(339): n is a, c, g, or t
  misc_feature (342)..(342): n is a, c, g, or t
  misc_feature (348)..(348): n is a, c, g, or t
  misc_feature (351)..(351): n is a, c, g, or t
  misc_feature (354)..(354): n is a, c, g, or t
  misc_feature (357)..(357): n is a, c, g, or t
  misc_feature (360)..(360): n is a, c, g, or t
  misc_feature (369)..(369): n is a, c, g, or t
  misc_feature (372)..(372): n is a, c, g, or t
  misc_feature (375)..(375): n is a, c, g, or t
  misc_feature (378)..(378): n is a, c, g, or t
  misc_feature (387)..(387): n is a, c, g, or t
  misc_feature (390)..(390): n is a, c, g, or t
  misc_feature (393)..(393): n is a, c, g, or t
  misc_feature (399)..(399): n is a, c, g, or t
gcngtnaarathwsnggngtnytnaargayggnacnggnaarccngtncaraaytgyacnathcarytnaargcnaarmgnaaywsnacnacngtngtngtnaayacnytngcnwsngaraayccngaygargcnggnmgntaywsnatggaygtngartayggncartaywsngtnathytnytngtngarggnttyccnccnwsncaygcnggnacnathacngtntaygargaywsnmgnccnggnacnytnaaygayttyytnggngcnatgacngargaygaygcnmgnccngargcnytnmgnmgnttygarytnatggtngargargtngcnmgnaaygcnwsngcngtngcncaraayacngcngcngcnaaraarwsngcnggngaygcn

SEQ ID NO: 767 - DNA, 399 bp, Artificial Sequence
  PfN-CNA61
  misc_feature (3)..(3): n is a, c, g, or t
  misc_feature (6)..(6): n is a, c, g, or t
  misc_feature (15)..(15): n is a, c, g, or t
  misc_feature (18)..(18): n is a, c, g, or t
  misc_feature (21)..(21): n is a, c, g, or t
  misc_feature (24)..(24): n is a, c, g, or t
  misc_feature (33)..(33): n is a, c, g, or t
  misc_feature (36)..(36): n is a, c, g, or t
  misc_feature (39)..(39): n is a, c, g, or t
  misc_feature (45)..(45): n is a, c, g, or t
  misc_feature (48)..(48): n is a, c, g, or t
  misc_feature (60)..(60): n is a, c, g, or t
  misc_feature (69)..(69): n is a, c, g, or t
  misc_feature (75)..(75): n is a, c, g, or t
  misc_feature (81)..(81): n is a, c, g, or t
  misc_feature (87)..(87): n is a, c, g, or t
  misc_feature (90)..(90): n is a, c, g, or t
  misc_feature (93)..(93): n is a, c, g, or t
  misc_feature (96)..(96): n is a, c, g, or t
  misc_feature (99)..(99): n is a, c, g, or t
  misc_feature (102)..(102): n is a, c, g, or t
  misc_feature (108)..(108): n is a, c, g, or t
  misc_feature (111)..(111): n is a, c, g, or t
  misc_feature (114)..(114): n is a, c, g, or t
  misc_feature (117)..(117): n is a, c, g, or t
  misc_feature (126)..(126): n is a, c, g, or t
  misc_feature (135)..(135): n is a, c, g, or t
  misc_feature (138)..(138): n is a, c, g, or t
  misc_feature (141)..(141): n is a, c, g, or t
  misc_feature (147)..(147): n is a, c, g, or t
  misc_feature (156)..(156): n is a, c, g, or t
  misc_feature (165)..(165): n is a, c, g, or t
  misc_feature (174)..(174): n is a, c, g, or t
  misc_feature (177)..(177): n is a, c, g, or t
  misc_feature (183)..(183): n is a, c, g, or t
  misc_feature (186)..(186): n is a, c, g, or t
  misc_feature (189)..(189): n is a, c, g, or t
  misc_feature (195)..(195): n is a, c, g, or t
  misc_feature (201)..(201): n is a, c, g, or t
  misc_feature (204)..(204): n is a, c, g, or t
  misc_feature (207)..(207): n is a, c, g, or t
  misc_feature (213)..(213): n is a, c, g, or t
  misc_feature (216)..(216): n is a, c, g, or t
  misc_feature (219)..(219): n is a, c, g, or t
  misc_feature (225)..(225): n is a, c, g, or t
  misc_feature (228)..(228): n is a, c, g, or t
  misc_feature (240)..(240): n is a, c, g, or t
  misc_feature (246)..(246): n is a, c, g, or t
  misc_feature (249)..(249): n is a, c, g, or t
  misc_feature (252)..(252): n is a, c, g, or t
  misc_feature (255)..(255): n is a, c, g, or t
  misc_feature (267)..(267): n is a, c, g, or t
  misc_feature (270)..(270): n is a, c, g, or t
  misc_feature (273)..(273): n is a, c, g, or t
  misc_feature (279)..(279): n is a, c, g, or t
  misc_feature (291)..(291): n is a, c, g, or t
  misc_feature (294)..(294): n is a, c, g, or t
  misc_feature (297)..(297): n is a, c, g, or t
  misc_feature (303)..(303): n is a, c, g, or t
  misc_feature (306)..(306): n is a, c, g, or t
  misc_feature (309)..(309): n is a, c, g, or t
  misc_feature (312)..(312): n is a, c, g, or t
  misc_feature (321)..(321): n is a, c, g, or t
  misc_feature (327)..(327): n is a, c, g, or t
  misc_feature (336)..(336): n is a, c, g, or t
  misc_feature (339)..(339): n is a, c, g, or t
  misc_feature (342)..(342): n is a, c, g, or t
  misc_feature (348)..(348): n is a, c, g, or t
  misc_feature (351)..(351): n is a, c, g, or t
  misc_feature (354)..(354): n is a, c, g, or t
  misc_feature (357)..(357): n is a, c, g, or t
  misc_feature (360)..(360): n is a, c, g, or t
  misc_feature (369)..(369): n is a, c, g, or t
  misc_feature (372)..(372): n is a, c, g, or t
  misc_feature (375)..(375): n is a, c, g, or t
  misc_feature (378)..(378): n is a, c, g, or t
  misc_feature (387)..(387): n is a, c, g, or t
  misc_feature (390)..(390): n is a, c, g, or t
  misc_feature (393)..(393): n is a, c, g, or t
  misc_feature (399)..(399): n is a, c, g, or t
gcngtnaarathwsnggngtnytnaargayggnacnggnaarccngtncaraaytgyacnathcarytnaargcnaarmgnaaywsnacnacngtngtngtnaayacnytngcnwsngaraayccngaygargcnggnmgntaywsnatggaygtngartayggncartaywsngtnathytnytngtngarggnttyccnccnwsncaygcnggnacnathacngtntaygargaywsncarccnggnacnytnaaygayttyytnggngcnatgacngargaygaygcnmgnccngargcnytnmgnmgnttygarytnatggtngargargtngcnmgnaaygcnwsngcngtngcncaraayacngcngcngcnaaraarwsngcnwsngaygcn

SEQ ID NO: 768 - DNA, 399 bp, Artificial Sequence
  PfN-CNA62
  misc_feature (3)..(3): n is a, c, g, or t
  misc_feature (6)..(6): n is a, c, g, or t
  misc_feature (15)..(15): n is a, c, g, or t
  misc_feature (18)..(18): n is a, c, g, or t
  misc_feature (21)..(21): n is a, c, g, or t
  misc_feature (24)..(24): n is a, c, g, or t
  misc_feature (33)..(33): n is a, c, g, or t
  misc_feature (36)..(36): n is a, c, g, or t
  misc_feature (39)..(39): n is a, c, g, or t
  misc_feature (45)..(45): n is a, c, g, or t
  misc_feature (48)..(48): n is a, c, g, or t
  misc_feature (60)..(60): n is a, c, g, or t
  misc_feature (69)..(69): n is a, c, g, or t
  misc_feature (75)..(75): n is a, c, g, or t
  misc_feature (81)..(81): n is a, c, g, or t
  misc_feature (87)..(87): n is a, c, g, or t
  misc_feature (90)..(90): n is a, c, g, or t
  misc_feature (93)..(93): n is a, c, g, or t
  misc_feature (96)..(96): n is a, c, g, or t
  misc_feature (99)..(99): n is a, c, g, or t
  misc_feature (102)..(102): n is a, c, g, or t
  misc_feature (108)..(108): n is a, c, g, or t
  misc_feature (111)..(111): n is a, c, g, or t
  misc_feature (114)..(114): n is a, c, g, or t
  misc_feature (117)..(117): n is a, c, g, or t
  misc_feature (126)..(126): n is a, c, g, or t
  misc_feature (135)..(135): n is a, c, g, or t
  misc_feature (138)..(138): n is a, c, g, or t
  misc_feature (141)..(141): n is a, c, g, or t
  misc_feature (147)..(147): n is a, c, g, or t
  misc_feature (156)..(156): n is a, c, g, or t
  misc_feature (165)..(165): n is a, c, g, or t
  misc_feature (174)..(174): n is a, c, g, or t
  misc_feature (177)..(177): n is a, c, g, or t
  misc_feature (183)..(183): n is a, c, g, or t
  misc_feature (186)..(186): n is a, c, g, or t
  misc_feature (189)..(189): n is a, c, g, or t
  misc_feature (195)..(195): n is a, c, g, or t
  misc_feature (201)..(201): n is a, c, g, or t
  misc_feature (204)..(204): n is a, c, g, or t
  misc_feature (207)..(207): n is a, c, g, or t
  misc_feature (213)..(213): n is a, c, g, or t
  misc_feature (216)..(216): n is a, c, g, or t
  misc_feature (219)..(219): n is a, c, g, or t
  misc_feature (225)..(225): n is a, c, g, or t
  misc_feature (228)..(228): n is a, c, g, or t
  misc_feature (240)..(240): n is a, c, g, or t
  misc_feature (246)..(246): n is a, c, g, or t
  misc_feature (249)..(249): n is a, c, g, or t
  misc_feature (252)..(252): n is a, c, g, or t
  misc_feature (255)..(255): n is a, c, g, or t
  misc_feature (267)..(267): n is a, c, g, or t
  misc_feature (270)..(270): n is a, c, g, or t
  misc_feature (273)..(273): n is a, c, g, or t
  misc_feature (279)..(279): n is a, c, g, or t
  misc_feature (291)..(291): n is a, c, g, or t
  misc_feature (294)..(294): n is a, c, g, or t
  misc_feature (297)..(297): n is a, c, g, or t
  misc_feature (303)..(303): n is a, c, g, or t
  misc_feature (306)..(306): n is a, c, g, or t
  misc_feature (309)..(309): n is a, c, g, or t
  misc_feature (312)..(312): n is a, c, g, or t
  misc_feature (321)..(321): n is a, c, g, or t
  misc_feature (327)..(327): n is a, c, g, or t
  misc_feature (336)..(336): n is a, c, g, or t
  misc_feature (339)..(339): n is a, c, g, or t
  misc_feature (342)..(342): n is a, c, g, or t
  misc_feature (348)..(348): n is a, c, g, or t
  misc_feature (351)..(351): n is a, c, g, or t
  misc_feature (354)..(354): n is a, c, g, or t
  misc_feature (357)..(357): n is a, c, g, or t
  misc_feature (360)..(360): n is a, c, g, or t
  misc_feature (369)..(369): n is a, c, g, or t
  misc_feature (372)..(372): n is a, c, g, or t
  misc_feature (375)..(375): n is a, c, g, or t
  misc_feature (378)..(378): n is a, c, g, or t
  misc_feature (387)..(387): n is a, c, g, or t
  misc_feature (390)..(390): n is a, c, g, or t
  misc_feature (393)..(393): n is a, c, g, or t
  misc_feature (399)..(399): n is a, c, g, or t
gcngtnaarathwsnggngtnytnaargayggngcnggnaarccngtncaraaytgyacnathcarytnaargcnaarmgnaaywsnacnacngtngtngtnaayacngtngcnwsngaraayccngaygargcnggnmgntaywsnatggaygtngarcayggncartaywsngtnathytnytngtngarggnttyccnccnwsncaygcnggnacnathacngtntaygargaywsncarccnggnacnytnaaygayttyytnggngcnatgacngargaygaygcnmgnccngargcnytnmgnmgnttygarytnatggtngargargtngcnmgnaaygcnwsngcngtngcncaraayacngcngcngcnaaraarwsngcnwsngaygcn

SEQ ID NO: 769 - DNA, 399 bp, Artificial Sequence
  PfN-CNA63
  misc_feature (3)..(3): n is a, c, g, or t
  misc_feature (6)..(6): n is a, c, g, or t
  misc_feature (15)..(15): n is a, c, g, or t
  misc_feature (18)..(18): n is a, c, g, or t
  misc_feature (21)..(21): n is a, c, g, or t
  misc_feature (24)..(24): n is a, c, g, or t
  misc_feature (33)..(33): n is a, c, g, or t
  misc_feature (36)..(36): n is a, c, g, or t
  misc_feature (39)..(39): n is a, c, g, or t
  misc_feature (45)..(45): n is a, c, g, or t
  misc_feature (60)..(60): n is a, c, g, or t
  misc_feature (69)..(69): n is a, c, g, or t
  misc_feature (75)..(75): n is a, c, g, or t
  misc_feature (81)..(81): n is a, c, g, or t
  misc_feature (87)..(87): n is a, c, g, or t
  misc_feature (90)..(90): n is a, c, g, or t
  misc_feature (93)..(93): n is a, c, g, or t
  misc_feature (96)..(96): n is a, c, g, or t
  misc_feature (99)..(99): n is a, c, g, or t
  misc_feature (102)..(102): n is a, c, g, or t
  misc_feature (108)..(108): n is a, c, g, or t
  misc_feature (111)..(111): n is a, c, g, or t
  misc_feature (114)..(114): n is a, c, g, or t
  misc_feature (117)..(117): n is a, c, g, or t
  misc_feature (126)..(126): n is a, c, g, or t
  misc_feature (135)..(135): n is a, c, g, or t
  misc_feature (138)..(138): n is a, c, g, or t
  misc_feature (141)..(141): n is a, c, g, or t
  misc_feature (147)..(147): n is a, c, g, or t
  misc_feature (156)..(156): n is a, c, g, or t
  misc_feature (165)..(165): n is a, c, g, or t
  misc_feature (174)..(174): n is a, c, g, or t
  misc_feature (177)..(177): n is a, c, g, or t
  misc_feature (183)..(183): n is a, c, g, or t
  misc_feature (186)..(186): n is a, c, g, or t
  misc_feature (189)..(189): n is a, c, g, or t
  misc_feature (192)..(192): n is a, c, g, or t
  misc_feature (195)..(195): n is a, c, g, or t
  misc_feature (201)..(201): n is a, c, g, or t
  misc_feature (204)..(204): n is a, c, g, or t
  misc_feature (207)..(207): n is a, c, g, or t
  misc_feature (213)..(213): n is a, c, g, or t
  misc_feature (216)..(216): n is a, c, g, or t
  misc_feature (219)..(219): n is a, c, g, or t
  misc_feature (225)..(225): n is a, c, g, or t
  misc_feature (228)..(228): n is a, c, g, or t
  misc_feature (240)..(240): n is a, c, g, or t
  misc_feature (243)..(243): n is a, c, g, or t
  misc_feature (246)..(246): n is a, c, g, or t
  misc_feature (249)..(249): n is a, c, g, or t
  misc_feature (252)..(252): n is a, c, g, or t
  misc_feature (255)..(255): n is a, c, g, or t
  misc_feature (267)..(267): n is a, c, g, or t
  misc_feature (270)..(270): n is a, c, g, or t
  misc_feature (273)..(273): n is a, c, g, or t
  misc_feature (279)..(279): n is a, c, g, or t
  misc_feature (291)..(291): n is a, c, g, or t
  misc_feature (294)..(294): n is a, c, g, or t
  misc_feature (297)..(297): n is a, c, g, or t
  misc_feature (303)..(303): n is a, c, g, or t
  misc_feature (306)..(306): n is a, c, g, or t
  misc_feature (309)..(309): n is a, c, g, or t
  misc_feature (312)..(312): n is a, c, g, or t
  misc_feature (321)..(321): n is a, c, g, or t
  misc_feature (327)..(327): n is a, c, g, or t
  misc_feature (336)..(336): n is a, c, g, or t
  misc_feature (339)..(339): n is a, c, g, or t
  misc_feature (342)..(342): n is a, c, g, or t
  misc_feature (348)..(348): n is a, c, g, or t
  misc_feature (351)..(351): n is a, c, g, or t
  misc_feature (354)..(354): n is a, c, g, or t
  misc_feature (357)..(357): n is a, c, g, or t
  misc_feature (360)..(360): n is a, c, g, or t
  misc_feature (369)..(369): n is a, c, g, or t
  misc_feature (372)..(372): n is a, c, g, or t
  misc_feature (375)..(375): n is a, c, g, or t
  misc_feature (378)..(378): n is a, c, g, or t
  misc_feature (387)..(387): n is a, c, g, or t
  misc_feature (390)..(390): n is a, c, g, or t
  misc_feature (393)..(393): n is a, c, g, or t
  misc_feature (399)..(399): n is a, c, g, or t
gcngtnaarathwsnggngtnytnaargayggngcnggnaarccnathcaraaytgyacnathcarytnaargcnaarmgnaaywsnacnacngtngtngtnaayacngtngcnwsngaraayccngaygargcnggnmgntaywsnatggaygtngartayggncartaywsngtnathytnytngtngtnggnttyccnccnwsncaygcnggnacnathacngtncaygargaywsnmgnccnggnacnytnaaygayttyytnggngcnatgacngargaygaygcnmgnccngargcnytnmgnmgnttygarytnatggtngargargtngcnmgnaaygcnwsngcngtngcncaraayacngcngcngcnaaraarwsngcnwsngaygcn

SEQ ID NO: 770 - DNA, 399 bp, Artificial Sequence
  PfN-CNA64
  misc_feature (3)..(3): n is a, c, g, or t
  misc_feature (6)..(6): n is a, c, g, or t
  misc_feature (9)..(9): n is a, c, g, or t
  misc_feature (15)..(15): n is a, c, g, or t
  misc_feature (18)..(18): n is a, c, g, or t
  misc_feature (21)..(21): n is a, c, g, or t
  misc_feature (24)..(24): n is a, c, g, or t
  misc_feature (33)..(33): n is a, c, g, or t
  misc_feature (36)..(36): n is a, c, g, or t
  misc_feature (39)..(39): n is a, c, g, or t
  misc_feature (45)..(45): n is a, c, g, or t
  misc_feature (60)..(60): n is a, c, g, or t
  misc_feature (69)..(69): n is a, c, g, or t
  misc_feature (75)..(75): n is a, c, g, or t
  misc_feature (78)..(78): n is a, c, g, or t
  misc_feature (81)..(81): n is a, c, g, or t
  misc_feature (87)..(87): n is a, c, g, or t
  misc_feature (90)..(90): n is a, c, g, or t
  misc_feature (93)..(93): n is a, c, g, or t
  misc_feature (96)..(96): n is a, c, g, or t
  misc_feature (99)..(99): n is a, c, g, or t
  misc_feature (102)..(102): n is a, c, g, or t
  misc_feature (108)..(108): n is a, c, g, or t
  misc_feature (111)..(111): n is a, c, g, or t
  misc_feature (114)..(114): n is a, c, g, or t
  misc_feature (117)..(117): n is a, c, g, or t
  misc_feature (126)..(126): n is a, c, g, or t
  misc_feature (135)..(135): n is a, c, g, or t
  misc_feature (138)..(138): n is a, c, g, or t
  misc_feature (141)..(141): n is a, c, g, or t
  misc_feature (147)..(147): n is a, c, g, or t
  misc_feature (156)..(156): n is a, c, g, or t
  misc_feature (165)..(165): n is a, c, g, or t
  misc_feature (174)..(174): n is a, c, g, or t
  misc_feature (177)..(177): n is a, c, g, or t
  misc_feature (183)..(183): n is a, c, g, or t
  misc_feature (186)..(186): n is a, c, g, or t
  misc_feature (189)..(189): n is a, c, g, or t
  misc_feature (195)..(195): n is a, c, g, or t
  misc_feature (201)..(201): n is a, c, g, or t
  misc_feature (204)..(204): n is a, c, g, or t
  misc_feature (207)..(207): n is a, c, g, or t
  misc_feature (213)..(213): n is a, c, g, or t
  misc_feature (216)..(216): n is a, c, g, or t
  misc_feature (219)..(219): n is a, c, g, or t
  misc_feature (225)..(225): n is a, c, g, or t
  misc_feature (228)..(228): n is a, c, g, or t
  misc_feature (240)..(240): n is a, c, g, or t
  misc_feature (246)..(246): n is a, c, g, or t
  misc_feature (249)..(249): n is a, c, g, or t
  misc_feature (252)..(252): n is a, c, g, or t
  misc_feature (255)..(255): n is a, c, g, or t
  misc_feature (267)..(267): n is a, c, g, or t
  misc_feature (270)..(270): n is a, c, g, or t
  misc_feature (273)..(273): n is a, c, g, or t
  misc_feature (279)..(279): n is a, c, g, or t
  misc_feature (291)..(291): n is a, c, g, or t
  misc_feature (294)..(294): n is a, c, g, or t
  misc_feature (297)..(297): n is a, c, g, or t
  misc_feature (303)..(303): n is a, c, g, or t
  misc_feature (306)..(306): n is a, c, g, or t
  misc_feature (309)..(309): n is a, c, g, or t
  misc_feature (312)..(312): n is a, c, g, or t
  misc_feature (321)..(321): n is a, c, g, or t
  misc_feature (327)..(327): n is a, c, g, or t
  misc_feature (336)..(336): n is a, c, g, or t
  misc_feature (339)..(339): n is a, c, g, or t
  misc_feature (342)..(342): n is a, c, g, or t
  misc_feature (348)..(348): n is a, c, g, or t
  misc_feature (351)..(351): n is a, c, g, or t
  misc_feature (354)..(354): n is a, c, g, or t
  misc_feature (357)..(357): n is a, c, g, or t
  misc_feature (360)..(360): n is a, c, g, or t
  misc_feature (369)..(369): n is a, c, g, or t
  misc_feature (372)..(372): n is a, c, g, or t
  misc_feature (375)..(375): n is a, c, g, or t
  misc_feature (378)..(378): n is a, c, g, or t
  misc_feature (387)..(387): n is a, c, g, or t
  misc_feature (390)..(390): n is a, c, g, or t
  misc_feature (393)..(393): n is a, c, g, or t
  misc_feature (399)..(399): n is a, c, g, or t
gcngtnmgnathwsnggngtnytnaargayggngcnggnaarccnathcaraaytgyacnathcarytnaargcnmgnmgnaaywsnacnacngtngtngtnaayacngtngcnwsngaraayccngaygargcnggnmgntaywsnatggaygtngartayggncartaywsngtnathytnytngtngarggnttyccnccnwsncaygcnggnacnathacngtntaygargaywsncarccnggnacnytnaaygayttyytnggngcnatgacngargaygaygtnmgnccngargcnytnmgnmgnttygarytnatggtngargargtngcnmgnaaygcnwsngcngtngcncaraayacngcngcngcnaaraarwsngcnwsngaygcn

SEQ ID NO: 771 - DNA, 399 bp, Artificial Sequence
  PfN-CNA65
  misc_feature (3)..(3): n is a, c, g, or t
  misc_feature (6)..(6): n is a, c, g, or t
  misc_feature (9)..(9): n is a, c, g, or t
  misc_feature (15)..(15): n is a, c, g, or t
  misc_feature (18)..(18): n is a, c, g, or t
  misc_feature (21)..(21): n is a, c, g, or t
  misc_feature (24)..(24): n is a, c, g, or t
  misc_feature (33)..(33): n is a, c, g, or t
  misc_feature (36)..(36): n is a, c, g, or t
  misc_feature (39)..(39): n is a, c, g, or t
  misc_feature (45)..(45): n is a, c, g, or t
  misc_feature (60)..(60): n is a, c, g, or t
  misc_feature (69)..(69): n is a, c, g, or t
  misc_feature (75)..(75): n is a, c, g, or t
  misc_feature (78)..(78): n is a, c, g, or t
  misc_feature (81)..(81): n is a, c, g, or t
  misc_feature (87)..(87): n is a, c, g, or t
  misc_feature (90)..(90): n is a, c, g, or t
  misc_feature (93)..(93): n is a, c, g, or t
  misc_feature (96)..(96): n is a, c, g, or t
  misc_feature (99)..(99): n is a, c, g, or t
  misc_feature (102)..(102): n is a, c, g, or t
  misc_feature (108)..(108): n is a, c, g, or t
  misc_feature (111)..(111): n is a, c, g, or t
  misc_feature (114)..(114): n is a, c, g, or t
  misc_feature (117)..(117): n is a, c, g, or t
  misc_feature (126)..(126): n is a, c, g, or t
  misc_feature (135)..(135): n is a, c, g, or t
  misc_feature (138)..(138): n is a, c, g, or t
  misc_feature (141)..(141): n is a, c, g, or t
  misc_feature (147)..(147): n is a, c, g, or t
  misc_feature (156)..(156): n is a, c, g, or t
  misc_feature (165)..(165): n is a, c, g, or t
  misc_feature (174)..(174): n is a, c, g, or t
  misc_feature (177)..(177): n is a, c, g, or t
  misc_feature (180)..(180): n is a, c, g, or t
  misc_feature (183)..(183): n is a, c, g, or t
  misc_feature (186)..(186): n is a, c, g, or t
  misc_feature (189)..(189): n is a, c, g, or t
  misc_feature (195)..(195): n is a, c, g, or t
  misc_feature (201)..(201): n is a, c, g, or t
  misc_feature (204)..(204): n is a, c, g, or t
  misc_feature (207)..(207): n is a, c, g, or t
  misc_feature (213)..(213): n is a, c, g, or t
  misc_feature (216)..(216): n is a, c, g, or t
  misc_feature (225)..(225): n is a, c, g, or t
  misc_feature (228)..(228): n is a, c, g, or t
  misc_feature (240)..(240): n is a, c, g, or t
  misc_feature (246)..(246): n is a, c, g, or t
  misc_feature (249)..(249): n is a, c, g, or t
  misc_feature (252)..(252): n is a, c, g, or t
  misc_feature (255)..(255): n is a, c, g, or t
  misc_feature (267)..(267): n is a, c, g, or t
  misc_feature (270)..(270): n is a, c, g, or t
  misc_feature (273)..(273): n is a, c, g, or t
  misc_feature (279)..(279): n is a, c, g, or t
  misc_feature (291)..(291): n is a, c, g, or t
  misc_feature (294)..(294): n is a, c, g, or t
  misc_feature (297)..(297): n is a, c, g, or t
  misc_feature (303)..(303): n is a, c, g, or t
  misc_feature (306)..(306): n is a, c, g, or t
  misc_feature (309)..(309): n is a, c, g, or t
  misc_feature (312)..(312): n is a, c, g, or t
  misc_feature (321)..(321): n is a, c, g, or t
  misc_feature (327)..(327): n is a, c, g, or t
  misc_feature (336)..(336): n is a, c, g, or t
  misc_feature (339)..(339): n is a, c, g, or t
  misc_feature (342)..(342): n is a, c, g, or t
  misc_feature (348)..(348): n is a, c, g, or t
  misc_feature (351)..(351): n is a, c, g, or t
  misc_feature (354)..(354): n is a, c, g, or t
  misc_feature (357)..(357): n is a, c, g, or t
  misc_feature (360)..(360): n is a, c, g, or t
  misc_feature (369)..(369): n is a, c, g, or t
  misc_feature (372)..(372): n is a, c, g, or t
  misc_feature (375)..(375): n is a, c, g, or t
  misc_feature (378)..(378): n is a, c, g, or t
  misc_feature (387)..(387): n is a, c, g, or t
  misc_feature (390)..(390): n is a, c, g, or t
  misc_feature (393)..(393): n is a, c, g, or t
  misc_feature (399)..(399): n is a, c, g, or t
gcngtnmgnathwsnggngtnytnaargayggngcnggnaarccnathcaraaytgyacnathcarytnaargcnmgnmgnaaywsnacnacngtngtngtnaayacngtngcnwsngaraayccngaygargcnggnmgntayacnatggaygtngartayggncartaywsngtnwsnytnytngtngarggnttyccnccnwsncaygcnggnathathacngtntaygargaywsnaarccnggnacnytnaaygayttyytnggngcnatgacngargaygaygtnmgnccngargcnytnmgnmgnttygarytnatggtngargargtngcnmgnaaygcnwsngcngtngcncaraayacngcngcngcnaaraarwsngcnggngaygcn

SEQ ID NO: 772 - DNA, 399 bp, Artificial Sequence
  PfN-CNA66
  misc_feature (3)..(3): n is a, c, g, or t
  misc_feature (6)..(6): n is a, c, g, or t
  misc_feature (15)..(15): n is a, c, g, or t
  misc_feature (18)..(18): n is a, c, g, or t
  misc_feature (21)..(21): n is a, c, g, or t
  misc_feature (24)..(24): n is a, c, g, or t
  misc_feature (33)..(33): n is a, c, g, or t
  misc_feature (36)..(36): n is a, c, g, or t
  misc_feature (39)..(39): n is a, c, g, or t
  misc_feature (45)..(45): n is a, c, g, or t
  misc_feature (48)..(48): n is a, c, g, or t
  misc_feature (60)..(60): n is a, c, g, or t
  misc_feature (69)..(69): n is a, c, g, or t
  misc_feature (75)..(75): n is a, c, g, or t
  misc_feature (78)..(78): n is a, c, g, or t
  misc_feature (81)..(81): n is a, c, g, or t
  misc_feature (87)..(87): n is a, c, g, or t
  misc_feature (90)..(90): n is a, c, g, or t
  misc_feature (93)..(93): n is a, c, g, or t
  misc_feature (96)..(96): n is a, c, g, or t
  misc_feature (99)..(99): n is a, c, g, or t
  misc_feature (102)..(102): n is a, c, g, or t
  misc_feature (108)..(108): n is a, c, g, or t
  misc_feature (111)..(111): n is a, c, g, or t
  misc_feature (114)..(114): n is a, c, g, or t
  misc_feature (117)..(117): n is a, c, g, or t
  misc_feature (126)..(126): n is a, c, g, or t
  misc_feature (135)..(135): n is a, c, g, or t
  misc_feature (138)..(138): n is a, c, g, or t
  misc_feature (141)..(141): n is a, c, g, or t
  misc_feature (147)..(147): n is a, c, g, or t
  misc_feature (156)..(156): n is a, c, g, or t
  misc_feature (165)..(165): n is a, c, g, or t
  misc_feature (174)..(174): n is a, c, g, or t
  misc_feature (177)..(177): n is a, c, g, or t
  misc_feature (183)..(183): n is a, c, g, or t
  misc_feature (186)..(186): n is a, c, g, or t
  misc_feature (189)..(189): n is a, c, g, or t
  misc_feature (195)..(195): n is a, c, g, or t
  misc_feature (201)..(201): n is a, c, g, or t
  misc_feature (204)..(204): n is a, c, g, or t
  misc_feature (207)..(207): n is a, c, g, or t
  misc_feature (213)..(213): n is a, c, g, or t
  misc_feature (216)..(216): n is a, c, g, or t
  misc_feature (219)..(219): n is a, c, g, or t
  misc_feature (225)..(225): n is a, c, g, or t
  misc_feature (228)..(228): n is a, c, g, or t
  misc_feature (240)..(240): n is a, c, g, or t
  misc_feature (246)..(246): n is a, c, g, or t
  misc_feature (249)..(249): n is a, c, g, or t
  misc_feature (252)..(252): n is a, c, g, or t
  misc_feature (255)..(255): n is a, c, g, or t
  misc_feature (267)..(267): n is a, c, g, or t
  misc_feature (270)..(270): n is a, c, g, or t
  misc_feature (273)..(273): n is a, c, g, or t
  misc_feature (279)..(279): n is a, c, g, or t
  misc_feature (291)..(291): n is a, c, g, or t
  misc_feature (294)..(294): n is a, c, g, or t
  misc_feature (297)..(297): n is a, c, g, or t
  misc_feature (303)..(303): n is a, c, g, or t
  misc_feature (306)..(306): n is a, c, g, or t
  misc_feature (309)..(309): n is a, c, g, or t
  misc_feature (312)..(312): n is a, c, g, or t
  misc_feature (321)..(321): n is a, c, g, or t
  misc_feature (327)..(327): n is a, c, g, or t
  misc_feature (336)..(336): n is a, c, g, or t
  misc_feature (339)..(339): n is a, c, g, or t
  misc_feature (342)..(342): n is a, c, g, or t
  misc_feature (348)..(348): n is a, c, g, or t
  misc_feature (351)..(351): n is a, c, g, or t
  misc_feature (354)..(354): n is a, c, g, or t
  misc_feature (357)..(357): n is a, c, g, or t
  misc_feature (360)..(360): n is a, c, g, or t
  misc_feature (369)..(369): n is a, c, g, or t
  misc_feature (372)..(372): n is a, c, g, or t
  misc_feature (375)..(375): n is a, c, g, or t
  misc_feature (378)..(378): n is a, c, g, or t
  misc_feature (387)..(387): n is a, c, g, or t
  misc_feature (390)..(390): n is a, c, g, or t
  misc_feature (393)..(393): n is a, c, g, or t
  misc_feature (399)..(399): n is a, c, g, or t
gcngtnaarathwsnggngtnytnaargayggnacnggnaarccngtngaraaytgyacnathcarytnaargcnmgnmgnaaywsngcnacngtngtngtnaayacngtngcnwsngaraayccngaygargcnggnmgntaywsnatggaygtngartayggncartaywsngtnathytnytngtngarggnttyccnccnwsncaygcnggnacnathacngtntaygargaywsncarccnggnacnytnaaygayttyytnggngcnatgacngargaygaygtnmgnccngargcnytnmgnmgnttygarytnatggtngargargtngcnmgnaaygcnwsngcngtngcncaraayacngcngcngcnaaraarwsngcnwsngaygcn

SEQ ID NO: 773 - DNA, 399 bp, Artificial Sequence
  PfN-CNA67
  misc_feature (3)..(3): n is a, c, g, or t
  misc_feature (6)..(6): n is a, c, g, or t
  misc_feature (15)..(15): n is a, c, g, or t
  misc_feature (18)..(18): n is a, c, g, or t
  misc_feature (21)..(21): n is a, c, g, or t
  misc_feature (24)..(24): n is a, c, g, or t
  misc_feature (33)..(33): n is a, c, g, or t
  misc_feature (36)..(36): n is a, c, g, or t
  misc_feature (39)..(39): n is a, c, g, or t
  misc_feature (45)..(45): n is a, c, g, or t
  misc_feature (48)..(48): n is a, c, g, or t
  misc_feature (60)..(60): n is a, c, g, or t
  misc_feature (69)..(69): n is a, c, g, or t
  misc_feature (75)..(75): n is a, c, g, or t
  misc_feature (78)..(78): n is a, c, g, or t
  misc_feature (81)..(81): n is a, c, g, or t
  misc_feature (87)..(87): n is a, c, g, or t
  misc_feature (90)..(90): n is a, c, g, or t
  misc_feature (93)..(93): n is a, c, g, or t
  misc_feature (96)..(96): n is a, c, g, or t
  misc_feature (99)..(99): n is a, c, g, or t
  misc_feature (102)..(102): n is a, c, g, or t
  misc_feature (108)..(108): n is a, c, g, or t
  misc_feature (111)..(111): n is a, c, g, or t
  misc_feature (114)..(114): n is a, c, g, or t
  misc_feature (117)..(117): n is a, c, g, or t
  misc_feature (126)..(126): n is a, c, g, or t
  misc_feature (135)..(135): n is a, c, g, or t
  misc_feature (138)..(138): n is a, c, g, or t
  misc_feature (141)..(141): n is a, c, g, or t
  misc_feature (147)..(147): n is a, c, g, or t
  misc_feature (156)..(156): n is a, c, g, or t
  misc_feature (165)..(165): n is a, c, g, or t
  misc_feature (174)..(174): n is a, c, g, or t
  misc_feature (177)..(177): n is a, c, g, or t
  misc_feature (183)..(183): n is a, c, g, or t
  misc_feature (189)..(189): n is a, c, g, or t
  misc_feature (195)..(195): n is a, c, g, or t
  misc_feature (201)..(201): n is a, c, g, or t
  misc_feature (204)..(204): n is a, c, g, or t
  misc_feature (207)..(207): n is a, c, g, or t
  misc_feature (213)..(213): n is a, c, g, or t
  misc_feature (216)..(216): n is a, c, g, or t
  misc_feature (219)..(219): n is a, c, g, or t
  misc_feature (225)..(225): n is a, c, g, or t
  misc_feature (228)..(228): n is a, c, g, or t
  misc_feature (240)..(240): n is a, c, g, or t
  misc_feature (246)..(246): n is a, c, g, or t
  misc_feature (249)..(249): n is a, c, g, or t
  misc_feature (252)..(252): n is a, c, g, or t
  misc_feature (255)..(255): n is a, c, g, or t
  misc_feature (267)..(267): n is a, c, g, or t
  misc_feature (273)..(273): n is a, c, g, or t
  misc_feature (279)..(279): n is a, c, g, or t
  misc_feature (291)..(291): n is a, c, g, or t
  misc_feature (294)..(294): n is a, c, g, or t
  misc_feature (297)..(297): n is a, c, g, or t
  misc_feature (303)..(303): n is a, c, g, or t
  misc_feature (306)..(306): n is a, c, g, or t
  misc_feature (309)..(309): n is a, c, g, or t
  misc_feature (312)..(312): n is a, c, g, or t
  misc_feature (315)..(315): n is a, c, g, or t
  misc_feature (321)..(321): n is a, c, g, or t
  misc_feature (327)..(327): n is a, c, g, or t
  misc_feature (336)..(336): n is a, c, g, or t
  misc_feature (339)..(339): n is a, c, g, or t
  misc_feature (342)..(342): n is a, c, g, or t
  misc_feature (348)..(348): n is a, c, g, or t
  misc_feature (351)..(351): n is a, c, g, or t
  misc_feature (354)..(354): n is a, c, g, or t
  misc_feature (357)..(357): n is a, c, g, or t
  misc_feature (360)..(360): n is a, c, g, or t
  misc_feature (366)..(366): n is a, c, g, or t
  misc_feature (369)..(369): n is a, c, g, or t
  misc_feature (372)..(372): n is a, c, g, or t
  misc_feature (378)..(378): n is a, c, g, or t
  misc_feature (387)..(387): n is a, c, g, or t
  misc_feature (390)..(390): n is a, c, g, or t
  misc_feature (393)..(393): n is a, c, g, or t
  misc_feature (399)..(399): n is a, c, g, or t
gcngtnaarathwsnggngtnytnaargayggnacnggnaarccngtncaraaytgyacnathcarytnaargcnmgnmgnaaywsnacnacngtngtngtnaayacngtnggnwsngaraayccngaygargcnggnmgntaywsnatggaygtngartayggncartaywsngtnathytncargtngayggnttyccnccnwsncaygcnggnacnathacngtntaygargaywsncarccnggnacnytnaaygayttyytntgygcnatgacngargaygaygcnmgnccngargtnytnmgnmgnytngarytnatggtngargargtngcnmgnaaygcnwsngtngtngcncarwsnacngcngaygcnaaraarwsngcnggngaygcn

SEQ ID NO: 774 - DNA, 387 bp, Artificial Sequence
  PfN-CNA68
  misc_feature (3)..(3): n is a, c, g, or t
  misc_feature (6)..(6): n is a, c, g, or t
  misc_feature (15)..(15): n is a, c, g, or t
  misc_feature (18)..(18): n is a, c, g, or t
  misc_feature (21)..(21): n is a, c, g, or t
  misc_feature (24)..(24): n is a, c, g, or t
  misc_feature (33)..(33): n is a, c, g, or t
  misc_feature (36)..(36): n is a, c, g, or t
  misc_feature (39)..(39): n is a, c, g, or t
  misc_feature (45)..(45): n is a, c, g, or t
  misc_feature (48)..(48): n is a, c, g, or t
  misc_feature (60)..(60): n is a, c, g, or t
  misc_feature (69)..(69): n is a, c, g, or t
  misc_feature (75)..(75): n is a, c, g, or t
  misc_feature (78)..(78): n is a, c, g, or t
  misc_feature (81)..(81): n is a, c, g, or t
  misc_feature (87)..(87): n is a, c, g, or t
  misc_feature (90)..(90): n is a, c, g, or t
  misc_feature (93)..(93): n is a, c, g, or t
  misc_feature (96)..(96): n is a, c, g, or t
  misc_feature (99)..(99): n is a, c, g, or t
  misc_feature (102)..(102): n is a, c, g, or t
  misc_feature (108)..(108): n is a, c, g, or t
  misc_feature (111)..(111): n is a, c, g, or t
  misc_feature (114)..(114): n is a, c, g, or t
  misc_feature (117)..(117): n is a, c, g, or t
  misc_feature (126)..(126): n is a, c, g, or t
  misc_feature (135)..(135): n is a, c, g, or t
  misc_feature (138)..(138): n is a, c, g, or t
  misc_feature (141)..(141): n is a, c, g, or t
  misc_feature (147)..(147): n is a, c, g, or t
  misc_feature (156)..(156): n is a, c, g, or t
  misc_feature (165)..(165): n is a, c, g, or t
  misc_feature (174)..(174): n is a, c, g, or t
  misc_feature (177)..(177): n is a, c, g, or t
  misc_feature (183)..(183): n is a, c, g, or t
  misc_feature (189)..(189): n is a, c, g, or t
  misc_feature (195)..(195): n is a, c, g, or t
  misc_feature (201)..(201): n is a, c, g, or t
  misc_feature (204)..(204): n is a, c, g, or t
  misc_feature (207)..(207): n is a, c, g, or t
  misc_feature (213)..(213): n is a, c, g, or t
  misc_feature (216)..(216): n is a, c, g, or t
  misc_feature (219)..(219): n is a, c, g, or t
  misc_feature (225)..(225): n is a, c, g, or t
  misc_feature (228)..(228): n is a, c, g, or t
  misc_feature (240)..(240): n is a, c, g, or t
  misc_feature (246)..(246): n is a, c, g, or t
  misc_feature (249)..(249): n is a, c, g, or t
  misc_feature (252)..(252): n is a, c, g, or t
  misc_feature (255)..(255): n is a, c, g, or t
  misc_feature (267)..(267): n is a, c, g, or t
  misc_feature (273)..(273): n is a, c, g, or t
  misc_feature (279)..(279): n is a, c, g, or t
  misc_feature (291)..(291): n is a, c, g, or t
  misc_feature (294)..(294): n is a, c, g, or t
  misc_feature (297)..(297): n is a, c, g, or t
  misc_feature (303)..(303): n is a, c, g, or t
  misc_feature (306)..(306): n is a, c, g, or t
  misc_feature (309)..(309): n is a, c, g, or t
  misc_feature (312)..(312): n is a, c, g, or t
  misc_feature (315)..(315): n is a, c, g, or t
  misc_feature (321)..(321): n is a, c, g, or t
  misc_feature (327)..(327): n is a, c, g, or t
  misc_feature (336)..(336): n is a, c, g, or t
  misc_feature (339)..(339): n is a, c, g, or t
  misc_feature (342)..(342): n is a, c, g, or t
  misc_feature (348)..(348): n is a, c, g, or t
  misc_feature (354)..(354): n is a, c, g, or t
  misc_feature (360)..(360): n is a, c, g, or t
  misc_feature (363)..(363): n is a, c, g, or t
  misc_feature (378)..(378): n is a, c, g, or t
  misc_feature (384)..(384): n is a, c, g, or t
gcngtnaarathwsnggngtnytnaargayggnacnggnaarccngtncaraaytgyacnathcarytnaargcnmgnmgnaaywsnacnacngtngtngtnaayacngtnggnwsngaraayccngaygargcnggnmgntaywsnatggaygtngartayggncartaywsngtnathytncargtngayggnttyccnccnwsncaygcnggnacnathacngtntaygargaywsncarccnggnacnytnaaygayttyytntgygcnatgacngargaygaygcnmgnccngargtnytnmgnmgnytngarytnatggtngargargtngcnmgnaayggnaarwsnaaygtnggntgyaaycartaygtnathacngay

SEQ ID NO: 775 - DNA, 399 bp, Artificial Sequence
  PfN-CNA69
  misc_feature (3)..(3): n is a, c, g, or t
  misc_feature (6)..(6): n is a, c, g, or t
  misc_feature (9)..(9): n is a, c, g, or t
  misc_feature (15)..(15): n is a, c, g, or t
  misc_feature (18)..(18): n is a, c, g, or t
  misc_feature (21)..(21): n is a, c, g, or t
  misc_feature (24)..(24): n is a, c, g, or t
  misc_feature (33)..(33): n is a, c, g, or t
  misc_feature (36)..(36): n is a, c, g, or t
  misc_feature (39)..(39): n is a, c, g, or t
  misc_feature (42)..(42): n is a, c, g, or t
  misc_feature (45)..(45): n is a, c, g, or t
  misc_feature (48)..(48): n is a, c, g, or t
  misc_feature (60)..(60): n is a, c, g, or t
  misc_feature (69)..(69): n is a, c, g, or t
  misc_feature (75)..(75): n is a, c, g, or t
  misc_feature (81)..(81): n is a, c, g, or t
  misc_feature (84)..(84): n is a, c, g, or t
  misc_feature (87)..(87): n is a, c, g, or t
  misc_feature (90)..(90): n is a, c, g, or t
  misc_feature (93)..(93): n is a, c, g, or t
  misc_feature (96)..(96): n is a, c, g, or t
  misc_feature (99)..(99): n is a, c, g, or t
  misc_feature (102)..(102): n is a, c, g, or t
  misc_feature (108)..(108): n is a, c, g, or t
  misc_feature (111)..(111): n is a, c, g, or t
  misc_feature (114)..(114): n is a, c, g, or t
  misc_feature (117)..(117): n is a, c, g, or t
  misc_feature (126)..(126): n is a, c, g, or t
  misc_feature (135)..(135): n is a, c, g, or t
  misc_feature (138)..(138): n is a, c, g, or t
  misc_feature (141)..(141): n is a, c, g, or t
  misc_feature (147)..(147): n is a, c, g, or t
  misc_feature (156)..(156): n is a, c, g, or t
  misc_feature (165)..(165): n is a, c, g, or t
  misc_feature (174)..(174): n is a, c, g, or t
  misc_feature (177)..(177): n is a, c, g, or t
  misc_feature (180)..(180): n is a, c, g, or t
  misc_feature (183)..(183): n is a, c, g, or t
  misc_feature (186)..(186): n is a, c, g, or t
  misc_feature (189)..(189): n is a, c, g, or t
  misc_feature (195)..(195): n is a, c, g, or t
  misc_feature (201)..(201): n is a, c, g, or t
  misc_feature (204)..(204): n is a, c, g, or t
  misc_feature (207)..(207): n is a, c, g, or t
  misc_feature (213)..(213): n is a, c, g, or t
  misc_feature (216)..(216): n is a, c, g, or t
  misc_feature (219)..(219): n is a, c, g, or t
  misc_feature (225)..(225): n is a, c, g, or t
  misc_feature (228)..(228): n is a, c, g, or t
  misc_feature (240)..(240): n is a, c, g, or t
  misc_feature (246)..(246): n is a, c, g, or t
  misc_feature (249)..(249): n is a, c, g, or t
  misc_feature (252)..(252): n is a, c, g, or t
  misc_feature (255)..(255): n is a, c, g, or t
  misc_feature (267)..(267): n is a, c, g, or t
  misc_feature (270)..(270): n is a, c, g, or t
  misc_feature (273)..(273): n is a, c, g, or t
  misc_feature (279)..(279): n is a, c, g, or t
  misc_feature (291)..(291): n is a, c, g, or t
  misc_feature (294)..(294): n is a, c, g, or t
  misc_feature (297)..(297): n is a, c, g, or t
  misc_feature (303)..(303): n is a, c, g, or t
  misc_feature (306)..(306): n is a, c, g, or t
  misc_feature (309)..(309): n is a, c, g, or t
  misc_feature (312)..(312): n is a, c, g, or t
  misc_feature (321)..(321): n is a, c, g, or t
  misc_feature (327)..(327): n is a, c, g, or t
  misc_feature (336)..(336): n is a, c, g, or t
  misc_feature (339)..(339): n is a, c, g, or t
  misc_feature (342)..(342): n is a, c, g, or t
  misc_feature (348)..(348): n is a, c, g, or t
  misc_feature (351)..(351): n is a, c, g, or t
  misc_feature (357)..(357): n is a, c, g, or t
  misc_feature (360)..(360): n is a, c, g, or t
  misc_feature (363)..(363): n is a, c, g, or t
  misc_feature (369)..(369): n is a, c, g, or t
  misc_feature (372)..(372): n is a, c, g, or t
  misc_feature (375)..(375): n is a, c, g, or t
  misc_feature (378)..(378): n is a, c, g, or t
  misc_feature (381)..(381): n is a, c, g, or t
  misc_feature (387)..(387): n is a, c, g, or t
  misc_feature (390)..(390): n is a, c, g, or t
  misc_feature (399)..(399): n is a, c, g, or t
ccngtnytnathwsnggngtnytnaargaygcnacnggnacnccngtncaraaytgyacnathcarytnaargcntgymgnacnwsnacnacngtngtngtnaayacngtngcnwsngaraayccngaygaygcnggnmgntaywsnatggaygtngarcarggncartayacngtnacnytnytngtngarggntayccnccnwsncaygcnggngtnathacngtntaygaygaywsnaarccnggnacnytnaaygayttyytnggngcnatgacngargaygaygtnmgnccngargcnytnmgnmgnttygargcnatggtngargargtngcnmgncargcnwsngargcnwsnmgnaaygcnacnwsngcnggncargcnwsngarcargcn

SEQ ID NO: 776 - DNA, 399 bp, Artificial Sequence
  PfN-CNA70
  misc_feature (3)..(3): n is a, c, g, or t
  misc_feature (6)..(6): n is a, c, g, or t
  misc_feature (9)..(9): n is a, c, g, or t
  misc_feature (15)..(15): n is a, c, g, or t
  misc_feature (18)..(18): n is a, c, g, or t
  misc_feature (21)..(21): n is a, c, g, or t
  misc_feature (24)..(24): n is a, c, g, or t
  misc_feature (33)..(33): n is a, c, g, or t
  misc_feature (36)..(36): n is a, c, g, or t
  misc_feature (39)..(39): n is a, c, g, or t
  misc_feature (42)..(42): n is a, c, g, or t
  misc_feature (45)..(45): n is a, c, g, or t
  misc_feature (48)..(48): n is a, c, g, or t
  misc_feature (60)..(60): n is a, c, g, or t
  misc_feature (69)..(69): n is a, c, g, or t
  misc_feature (75)..(75): n is a, c, g, or t
  misc_feature (81)..(81): n is a, c, g, or t
  misc_feature (84)..(84): n is a, c, g, or t
  misc_feature (87)..(87): n is a, c, g, or t
  misc_feature (90)..(90): n is a, c, g, or t
  misc_feature (93)..(93): n is a, c, g, or t
  misc_feature (96)..(96): n is a, c, g, or t
  misc_feature (99)..(99): n is a, c, g, or t
  misc_feature (102)..(102): n is a, c, g, or t
  misc_feature (108)..(108): n is a, c, g, or t
  misc_feature (111)..(111): n is a, c, g, or t
  misc_feature (114)..(114): n is a, c, g, or t
  misc_feature (117)..(117): n is a, c, g, or t
  misc_feature (126)..(126): n is a, c, g, or t
  misc_feature (135)..(135): n is a, c, g, or t
  misc_feature (138)..(138): n is a, c, g, or t
  misc_feature (141)..(141): n is a, c, g, or t
  misc_feature (147)..(147): n is a, c, g, or t
  misc_feature (156)..(156): n is a, c, g, or t
  misc_feature (165)..(165): n is a, c, g, or t
  misc_feature (174)..(174): n is a, c, g, or t
  misc_feature (177)..(177): n is a, c, g, or t
  misc_feature (180)..(180): n is a, c, g, or t
  misc_feature (183)..(183): n is a, c, g, or t
  misc_feature (186)..(186): n is a, c, g, or t
  misc_feature (189)..(189): n is a, c, g, or t
  misc_feature (195)..(195): n is a, c, g, or t
  misc_feature (201)..(201): n is a, c, g, or t
  misc_feature (204)..(204): n is a, c, g, or t
  misc_feature (207)..(207): n is a, c, g, or t
  misc_feature (213)..(213): n is a, c, g, or t
  misc_feature (216)..(216): n is a, c, g, or t
  misc_feature (219)..(219): n is a, c, g, or t
  misc_feature (225)..(225): n is a, c, g, or t
  misc_feature (228)..(228): n is a, c, g, or t
  misc_feature (240)..(240): n is a, c, g, or t
  misc_feature (246)..(246): n is a, c, g, or t
  misc_feature (249)..(249): n is a, c, g, or t
  misc_feature (252)..(252): n is a, c, g, or t
  misc_feature (255)..(255): n is a, c, g, or t
  misc_feature (267)..(267): n is a, c, g, or t
  misc_feature (270)..(270): n is a, c, g, or t
  misc_feature (273)..(273): n is a, c, g, or t
  misc_feature (279)..(279): n is a, c, g, or t
  misc_feature (291)..(291): n is a, c, g, or t
  misc_feature (294)..(294): n is a, c, g, or t
  misc_feature (297)..(297): n is a, c, g, or t
  misc_feature (303)..(303): n is a, c, g, or t
  misc_feature (306)..(306): n is a, c, g, or t
  misc_feature (309)..(309): n is a, c, g, or t
  misc_feature (312)..(312): n is a, c, g, or t
  misc_feature (321)..(321): n is a, c, g, or t
  misc_feature (327)..(327): n is a, c, g, or t
  misc_feature (336)..(336): n is a, c, g, or t
  misc_feature (339)..(339): n is a, c, g, or t
  misc_feature (342)..(342): n is a, c, g, or t
  misc_feature (348)..(348): n is a, c, g, or t
  misc_feature (351)..(351): n is a, c, g, or t
  misc_feature (357)..(357): n is a, c, g, or t
  misc_feature (360)..(360): n is a, c, g, or t
  misc_feature (363)..(363): n is a, c, g, or t
  misc_feature (369)..(369): n is a, c, g, or t
  misc_feature (372)..(372): n is a, c, g, or t
  misc_feature (375)..(375): n is a, c, g, or t
  misc_feature (378)..(378): n is a, c, g, or t
  misc_feature (381)..(381): n is a, c, g, or t
  misc_feature (387)..(387): n is a, c, g, or t
  misc_feature (390)..(390): n is a, c, g, or t
  misc_feature (399)..(399): n is a, c, g, or t
ccngtnytnathwsnggngtnytnaargaygcnacnggnacnccngtncaraaytgyacnathcarytnaargcntgymgnacnwsnacnacngtngtngtnaayacngtngcnwsngaraayccngaygaygcnggnmgntaywsnatggaygtngarcarggncartayacngtnacnytnytngtngarggntayccnccnwsncaygcnggngtnathacngtntaygaygaywsnaarccnggnacnytnaaygayttyytnggngcnatgacngargaygaygtnmgnccngargcnytnmgnmgnttygargcnatggtngargargtngcnmgncargcnwsngargcnwsnmgnaaygcnacngcngcnggncargcnwsngarcargcn

SEQ ID NO: 777 - DNA, 399 bp, Artificial Sequence
  PfN-CNA71
  misc_feature (3)..(3): n is a, c, g, or t
  misc_feature (6)..(6): n is a, c, g, or t
  misc_feature (9)..(9): n is a, c, g, or t
  misc_feature (15)..(15): n is a, c, g, or t
  misc_feature (18)..(18): n is a, c, g, or t
  misc_feature (21)..(21): n is a, c, g, or t
  misc_feature (24)..(24): n is a, c, g, or t
  misc_feature (33)..(33): n is a, c, g, or t
  misc_feature (36)..(36): n is a, c, g, or t
  misc_feature (39)..(39): n is a, c, g, or t
  misc_feature (42)..(42): n is a, c, g, or t
  misc_feature (45)..(45): n is a, c, g, or t
  misc_feature (48)..(48): n is a, c, g, or t
  misc_feature (60)..(60): n is a, c, g, or t
  misc_feature (69)..(69): n is a, c, g, or t
  misc_feature (75)..(75): n is a, c, g, or t
  misc_feature (81)..(81): n is a, c, g, or t
  misc_feature (84)..(84): n is a, c, g, or t
  misc_feature (87)..(87): n is a, c, g, or t
  misc_feature (90)..(90): n is a, c, g, or t
  misc_feature (93)..(93): n is a, c, g, or t
  misc_feature (96)..(96): n is a, c, g, or t
  misc_feature (99)..(99): n is a, c, g, or t
  misc_feature (102)..(102): n is a, c, g, or t
  misc_feature (108)..(108): n is a, c, g, or t
  misc_feature (111)..(111): n is a, c, g, or t
  misc_feature (114)..(114): n is a, c, g, or t
  misc_feature (117)..(117): n is a, c, g, or t
  misc_feature (126)..(126): n is a, c, g, or t
  misc_feature (135)..(135): n is a, c, g, or t
  misc_feature (138)..(138): n is a, c, g, or t
  misc_feature (141)..(141): n is a, c, g, or t
  misc_feature (147)..(147): n is a, c, g, or t
  misc_feature (156)..(156): n is a, c, g, or t
  misc_feature (165)..(165): n is a, c, g, or t
  misc_feature (174)..(174): n is a, c, g, or t
  misc_feature (177)..(177): n is a, c, g, or t
  misc_feature (180)..(180): n is a, c, g, or t
  misc_feature (183)..(183): n is a, c, g, or t
  misc_feature (186)..(186): n is a, c, g, or t
  misc_feature (189)..(189): n is a, c, g, or t
  misc_feature (195)..(195): n is a, c, g, or t
  misc_feature (201)..(201): n is a, c, g, or t
  misc_feature (204)..(204): n is a, c, g, or t
  misc_feature (207)..(207): n is a, c, g, or t
  misc_feature (213)..(213): n is a, c, g, or t
  misc_feature (216)..(216): n is a, c, g, or t
  misc_feature (219)..(219): n is a, c, g, or t
  misc_feature (225)..(225): n is a, c, g, or t
  misc_feature (228)..(228): n is a, c, g, or t
  misc_feature (240)..(240): n is a, c, g, or t
  misc_feature (246)..(246): n is a, c, g, or t
  misc_feature (249)..(249): n is a, c, g, or t
  misc_feature (252)..(252): n is a, c, g, or t
  misc_feature (255)..(255): n is a, c, g, or t
  misc_feature (267)..(267): n is a, c, g, or t
  misc_feature (270)..(270): n is a, c, g, or t
  misc_feature (273)..(273): n is a, c, g, or t
  misc_feature (279)..(279): n is a, c, g, or t
  misc_feature (291)..(291): n is a, c, g, or t
  misc_feature (294)..(294): n is a, c, g, or t
  misc_feature (297)..(297): n is a, c, g, or t
  misc_feature (303)..(303): n is a, c, g, or t
  misc_feature (306)..(306): n is a, c, g, or t
  misc_feature (309)..(309): n is a, c, g, or t
  misc_feature (312)..(312): n is a, c, g, or t
  misc_feature (321)..(321): n is a, c, g, or t
  misc_feature (327)..(327): n is a, c, g, or t
  misc_feature (336)..(336): n is a, c, g, or t
  misc_feature (339)..(339): n is a, c, g, or t
  misc_feature (342)..(342): n is a, c, g, or t
  misc_feature (348)..(348): n is a, c, g, or t
  misc_feature (351)..(351): n is a, c, g, or t
  misc_feature (357)..(357): n is a, c, g, or t
  misc_feature (360)..(360): n is a, c, g, or t
  misc_feature (363)..(363): n is a, c, g, or t
  misc_feature (369)..(369): n is a, c, g, or t
  misc_feature (372)..(372): n is a, c, g, or t
  misc_feature (375)..(375): n is a, c, g, or t
  misc_feature (378)..(378): n is a, c, g, or t
  misc_feature (381)..(381): n is a, c, g, or t
  misc_feature (387)..(387): n is a, c, g, or t
  misc_feature (390)..(390): n is a, c, g, or t
  misc_feature (399)..(399): n is a, c, g, or t
ccngtnytnathwsnggngtnytnaargayggnacnggnacnccngtncaraaytgyacnathcarytnaargcntgymgnacnwsnacnacngtngtngtnaayacngtngcnwsngaraayccngaygaygcnggnmgntaywsnatggaygtngarcarggncartayacngtnacnytnytngtngayggntayccnccnwsncaygcnggngtnathacngtntaygaygaywsnaarytnggnacnytnaaygayttyytnggngcnatgacngargaygaygtnmgnccngargcnytnmgnmgnttygargcnatggtngargargtngcnmgncargcnwsngargcnwsnmgnaaygcnacngcngcnggncargcnwsngarcargcn

SEQ ID NO: 778 - DNA, 399 bp, Artificial Sequence
  PfN-CNA72
  misc_feature (3)..(3): n is a, c, g, or t
  misc_feature (6)..(6): n is a, c, g, or t
  misc_feature (9)..(9): n is a, c, g, or t
  misc_feature (15)..(15): n is a, c, g, or t
  misc_feature (18)..(18): n is a, c, g, or t
  misc_feature (21)..(21): n is a, c, g, or t
  misc_feature (24)..(24): n is a, c, g, or t
  misc_feature (33)..(33): n is a, c, g, or t
  misc_feature (36)..(36): n is a, c, g, or t
  misc_feature (39)..(39): n is a, c, g, or t
  misc_feature (42)..(42): n is a, c, g, or t
  misc_feature (45)..(45): n is a, c, g, or t
  misc_feature (48)..(48): n is a, c, g, or t
  misc_feature (60)..(60): n is a, c, g, or t
  misc_feature (69)..(69): n is a, c, g, or t
  misc_feature (75)..(75): n is a, c, g, or t
  misc_feature (81)..(81): n is a, c, g, or t
  misc_feature (84)..(84): n is a, c, g, or t
  misc_feature (87)..(87): n is a, c, g, or t
  misc_feature (90)..(90): n is a, c, g, or t
  misc_feature (93)..(93): n is a, c, g, or t
  misc_feature (96)..(96): n is a, c, g, or t
  misc_feature (99)..(99): n is a, c, g, or t
  misc_feature (102)..(102): n is a, c, g, or t
  misc_feature (108)..(108): n is a, c, g, or t
  misc_feature (111)..(111): n is a, c, g, or t
  misc_feature (114)..(114): n is a, c, g, or t
  misc_feature (117)..(117): n is a, c, g, or t
  misc_feature (126)..(126): n is a, c, g, or t
  misc_feature (135)..(135): n is a, c, g, or t
  misc_feature (138)..(138): n is a, c, g, or t
  misc_feature (141)..(141): n is a, c, g, or t
  misc_feature (147)..(147): n is a, c, g, or t
  misc_feature (156)..(156): n is a, c, g, or t
  misc_feature (165)..(165): n is a, c, g, or t
  misc_feature (174)..(174): n is a, c, g, or t
  misc_feature (177)..(177): n is a, c, g, or t
  misc_feature (180)..(180): n is a, c, g, or t
  misc_feature (183)..(183): n is a, c, g, or t
  misc_feature (186)..(186): n is a, c, g, or t
  misc_feature (189)..(189): n is a, c, g, or t
  misc_feature (195)..(195): n is a, c, g, or t
  misc_feature (201)..(201): n is a, c, g, or t
  misc_feature (204)..(204): n is a, c, g, or t
  misc_feature (207)..(207): n is a, c, g, or t
  misc_feature (213)..(213): n is a, c, g, or t
  misc_feature (216)..(216): n is a, c, g, or t
  misc_feature (219)..(219): n is a, c, g, or t
  misc_feature (225)..(225): n is a, c, g, or t
  misc_feature (228)..(228): n is a, c, g, or t
  misc_feature (240)..(240): n is a, c, g, or t
  misc_feature (246)..(246): n is a, c, g, or t
  misc_feature (249)..(249): n is a, c, g, or t
  misc_feature (252)..(252): n is a, c, g, or t
  misc_feature (255)..(255): n is a, c, g, or t
  misc_feature (267)..(267): n is a, c, g, or t
  misc_feature (270)..(270): n is a, c, g, or t
  misc_feature (273)..(273): n is a, c, g, or t
  misc_feature (279)..(279): n is a, c, g, or t
  misc_feature (291)..(291): n is a, c, g, or t
  misc_feature (294)..(294): n is a, c, g, or t
  misc_feature (297)..(297): n is a, c, g, or t
  misc_feature (303)..(303): n is a, c, g, or t
  misc_feature (306)..(306): n is a, c, g, or t
  misc_feature (309)..(309): n is a, c, g, or t
  misc_feature (312)..(312): n is a, c, g, or t
  misc_feature (321)..(321): n is a, c, g, or t
  misc_feature (327)..(327): n is a, c, g, or t
  misc_feature (336)..(336): n is a, c, g, or t
  misc_feature (339)..(339): n is a, c, g, or t
  misc_feature (342)..(342): n is a, c, g, or t
  misc_feature (348)..(348): n is a, c, g, or t
  misc_feature (351)..(351): n is a, c, g, or t
  misc_feature (357)..(357): n is a, c, g, or t
  misc_feature (360)..(360): n is a, c, g, or t
  misc_feature (363)..(363): n is a, c, g, or t
  misc_feature (369)..(369): n is a, c, g, or t
  misc_feature (372)..(372): n is a, c, g, or t
  misc_feature (375)..(375): n is a, c, g, or t
  misc_feature (378)..(378): n is a, c, g, or t
  misc_feature (381)..(381): n is a, c, g, or t
  misc_feature (387)..(387): n is a, c, g, or t
  misc_feature (390)..(390): n is a, c, g, or t
  misc_feature (399)..(399): n is a, c, g, or t
ccngtnytnathwsnggngtnytnaargayggnacnggnacnccngtncaraaytgyacnathcarytnaargcntgymgnacnwsnacnacngtngtngtnaayacngtngcnwsngaraayccngaygaygcnggnmgntaywsnatggaygtngarcarggncartayacngtnacnytnytngtngayggntayccnccnwsncaygcnggngtnathacngtntaygaygaywsnaarccnggnacnytnaaygayttyytnggngcnatgacngargaygaygtnmgnccngargcnytnmgnmgnttygargcnatggtngargargtngcnmgncargcnwsngargcnwsnmgnaaygcnacngcngcnggncargcnwsngarcargcn

SEQ ID NO: 779 - DNA, 399 bp, Artificial Sequence
  PfN-CNA73
  misc_feature (3)..(3): n is a, c, g, or t
  misc_feature (6)..(6): n is a, c, g, or t
  misc_feature (9)..(9): n is a, c, g, or t
  misc_feature (15)..(15): n is a, c, g, or t
  misc_feature (18)..(18): n is a, c, g, or t
  misc_feature (21)..(21): n is a, c, g, or t
  misc_feature (24)..(24): n is a, c, g, or t
  misc_feature (33)..(33): n is a, c, g, or t
  misc_feature (36)..(36): n is a, c, g, or t
  misc_feature (39)..(39): n is a, c, g, or t
  misc_feature (42)..(42): n is a, c, g, or t
  misc_feature (45)..(45): n is a, c, g, or t
  misc_feature (48)..(48): n is a, c, g, or t
  misc_feature (60)..(60): n is a, c, g, or t
  misc_feature (69)..(69): n is a, c, g, or t
  misc_feature (75)..(75): n is a, c, g, or t
  misc_feature (81)..(81): n is a, c, g, or t
  misc_feature (84)..(84): n is a, c, g, or t
  misc_feature (87)..(87): n is a, c, g, or t
  misc_feature (90)..(90): n is a, c, g, or t
  misc_feature (93)..(93): n is a, c, g, or t
  misc_feature (96)..(96): n is a, c, g, or t
  misc_feature (99)..(99): n is a, c, g, or t
  misc_feature (102)..(102): n is a, c, g, or t
  misc_feature (108)..(108): n is a, c, g, or t
  misc_feature (111)..(111): n is a, c, g, or t
  misc_feature (114)..(114): n is a, c, g, or t
  misc_feature (117)..(117): n is a, c, g, or t
  misc_feature (126)..(126): n is a, c, g, or t
  misc_feature (135)..(135): n is a, c, g, or t
  misc_feature (138)..(138): n is a, c, g, or t
  misc_feature (141)..(141): n is a, c, g, or t
  misc_feature (147)..(147): n is a, c, g, or t
  misc_feature (156)..(156): n is a, c, g, or t
  misc_feature (165)..(165): n is a, c, g, or t
  misc_feature (174)..(174): n is a, c, g, or t
  misc_feature (177)..(177): n is a, c, g, or t
  misc_feature (180)..(180): n is a, c, g, or t
  misc_feature (183)..(183): n is a, c, g, or t
  misc_feature (186)..(186): n is a, c, g, or t
  misc_feature (189)..(189): n is a, c, g, or t
  misc_feature (195)..(195): n is a, c, g, or t
  misc_feature (201)..(201): n is a, c, g, or t
  misc_feature (204)..(204): n is a, c, g, or t
  misc_feature (207)..(207): n is a, c, g, or t
  misc_feature (213)..(213): n is a, c, g, or t
  misc_feature (216)..(216): n is a, c, g, or t
  misc_feature (219)..(219): n is a, c, g, or t
  misc_feature (225)..(225): n is a, c, g, or t
  misc_feature (228)..(228): n is a, c, g, or t
  misc_feature (240)..(240): n is a, c, g, or t
  misc_feature (246)..(246): n is a, c, g, or t
  misc_feature (249)..(249): n is a, c, g, or t
  misc_feature (252)..(252): n is a, c, g, or t
  misc_feature (255)..(255): n is a, c, g, or t
  misc_feature (267)..(267): n is a, c, g, or t
  misc_feature (270)..(270): n is a, c, g, or t
  misc_feature (273)..(273): n is a, c, g, or t
  misc_feature (279)..(279): n is a, c, g, or t
  misc_feature (291)..(291): n is a, c, g, or t
  misc_feature (294)..(294): n is a, c, g, or t
  misc_feature (297)..(297): n is a, c, g, or t
  misc_feature (303)..(303): n is a, c, g, or t
  misc_feature (306)..(306): n is a, c, g, or t
  misc_feature (309)..(309): n is a, c, g, or t
  misc_feature (312)..(312): n is a, c, g, or t
  misc_feature (321)..(321): n is a, c, g, or t
  misc_feature (327)..(327): n is a, c, g, or t
  misc_feature (336)..(336): n is a, c, g, or t
  misc_feature (339)..(339): n is a, c, g, or t
  misc_feature (342)..(342): n is a, c, g, or t
  misc_feature (348)..(348): n is a, c, g, or t
  misc_feature (351)..(351): n is a, c, g, or t
  misc_feature (357)..(357): n is a, c, g, or t
  misc_feature (360)..(360): n is a, c, g, or t
  misc_feature (363)..(363): n is a, c, g, or t
  misc_feature (369)..(369): n is a, c, g, or t
  misc_feature (372)..(372): n is a, c, g, or t
  misc_feature (375)..(375): n is a, c, g, or t
  misc_feature (378)..(378): n is a, c, g, or t
  misc_feature (381)..(381): n is a, c, g, or t
  misc_feature (387)..(387): n is a, c, g, or t
  misc_feature (390)..(390): n is a, c, g, or t
  misc_feature (399)..(399): n is a, c, g, or t
ccngtnytnathwsnggngtnytnaargayggnacnggnacnccngtncaraaytgyacnathcarytnaargcntgymgnacnwsnacnacngtngtngtnaayacngtngcnwsngaraayccngaygaygcnggnmgntaywsnatggaygtngarcarggncartayacngtnacnytnytngtngayggntayccnccnwsncaygcnggngtnathacngtntaygaygaywsnaarccnggnacnytnaaygayttyytnggngcnatgacngargaygaygtnmgnccngargcnytnmgnwsnttygargcnatggtngargargtngcnmgncargcnwsngargcnwsnmgnaaygcnacngcngcnggncargcnwsngarcargcn

SEQ ID NO: 780 - DNA, 399 bp, Artificial Sequence
  PfN-CNA74
  misc_feature (3)..(3): n is a, c, g, or t
  misc_feature (6)..(6): n is a, c, g, or t
  misc_feature (9)..(9): n is a, c, g, or t
  misc_feature (15)..(15): n is a, c, g, or t
  misc_feature (18)..(18): n is a, c, g, or t
  misc_feature (21)..(21): n is a, c, g, or t
  misc_feature (24)..(24): n is a, c, g, or t
  misc_feature (33)..(33): n is a, c, g, or t
  misc_feature (36)..(36): n is a, c, g, or t
  misc_feature (39)..(39): n is a, c, g, or t
  misc_feature (42)..(42): n is a, c, g, or t
  misc_feature (45)..(45): n is a, c, g, or t
  misc_feature (48)..(48): n is a, c, g, or t
  misc_feature (60)..(60): n is a, c, g, or t
  misc_feature (69)..(69): n is a, c, g, or t
  misc_feature (75)..(75): n is a, c, g, or t
  misc_feature (81)..(81): n is a, c, g, or t
  misc_feature (84)..(84): n is a, c, g, or t
  misc_feature (87)..(87): n is a, c, g, or t
  misc_feature (90)..(90): n is a, c, g, or t
  misc_feature (93)..(93): n is a, c, g, or t
  misc_feature (96)..(96): n is a, c, g, or t
  misc_feature (99)..(99): n is a, c, g, or t
  misc_feature (102)..(102): n is a, c, g, or t
  misc_feature (108)..(108): n is a, c, g, or t
  misc_feature (111)..(111): n is a, c, g, or t
  misc_feature (114)..(114): n is a, c, g, or t
  misc_feature (117)..(117): n is a, c, g, or t
  misc_feature (126)..(126): n is a, c, g, or t
  misc_feature (135)..(135): n is a, c, g, or t
  misc_feature (138)..(138): n is a, c, g, or t
  misc_feature (141)..(141): n is a, c, g, or t
  misc_feature (147)..(147): n is a, c, g, or t
  misc_feature (156)..(156): n is a, c, g, or t
  misc_feature (165)..(165): n is a, c, g, or t
  misc_feature (174)..(174): n is a, c, g, or t
  misc_feature (177)..(177): n is a, c, g, or t
  misc_feature (180)..(180): n is a, c, g, or t
  misc_feature (183)..(183): n is a, c, g, or t
  misc_feature (186)..(186): n is a, c, g, or t
  misc_feature (189)..(189): n is a, c, g, or t
  misc_feature (195)..(195): n is a, c, g, or t
  misc_feature (201)..(201): n is a, c, g, or t
  misc_feature (204)..(204): n is a, c, g, or t
  misc_feature (207)..(207): n is a, c, g, or t
  misc_feature (213)..(213): n is a, c, g, or t
  misc_feature (216)..(216): n is a, c, g, or t
  misc_feature (219)..(219): n is a, c, g, or t
  misc_feature (225)..(225): n is a, c, g, or t
  misc_feature (228)..(228): n is a, c, g, or t
  misc_feature (240)..(240): n is a, c, g, or t
  misc_feature (246)..(246): n is a, c, g, or t
  misc_feature (249)..(249): n is a, c, g, or t
  misc_feature (252)..(252): n is a, c, g, or t
  misc_feature (255)..(255): n is a, c, g, or t
  misc_feature (267)..(267): n is a, c, g, or t
  misc_feature (270)..(270): n is a, c, g, or t
  misc_feature (273)..(273): n is a, c, g, or t
  misc_feature (279)..(279): n is a, c, g, or t
  misc_feature (291)..(291): n is a, c, g, or t
  misc_feature (294)..(294): n is a, c, g, or t
  misc_feature (297)..(297): n is a, c, g, or t
  misc_feature (303)..(303): n is a, c, g, or t
  misc_feature (306)..(306): n is a, c, g, or t
  misc_feature (309)..(309): n is a, c, g, or t
  misc_feature (312)..(312): n is a, c, g, or t
  misc_feature (321)..(321): n is a, c, g, or t
  misc_feature (327)..(327): n is a, c, g, or t
  misc_feature (336)..(336): n is a, c, g, or t
  misc_feature (339)..(339): n is a, c, g, or t
  misc_feature (342)..(342): n is a, c, g, or t
  misc_feature (348)..(348): n is a, c, g, or t
  misc_feature (351)..(351): n is a, c, g, or t
  misc_feature (357)..(357): n is a, c, g, or t
  misc_feature (360)..(360): n is a, c, g, or t
  misc_feature (363)..(363): n is a, c, g, or t
  misc_feature (369)..(369): n is a, c, g, or t
  misc_feature (372)..(372): n is a, c, g, or t
  misc_feature (375)..(375): n is a, c, g, or t
  misc_feature (378)..(378): n is a, c, g, or t
  misc_feature (381)..(381): n is a, c, g, or t
  misc_feature (387)..(387): n is a, c, g, or t
  misc_feature (390)..(390): n is a, c, g, or t
  misc_feature (399)..(399): n is a, c, g, or t
ccngtnytnathwsnggngtnytnaargayggnacnggnacnccngtncaraaytgyacnathcarytnaargcntgymgnacnwsnacnacngtngtngtnaayacngtngcnwsngaraayccngaygaygcnggnmgntaywsnatggaygtngarcarggncartayacngtnacnytnytngtngarggntayccnccnwsncaygcnggngtnathacngtntaygaygaywsnaarccnggnacnytnaaygayttyytnggngcnatgacngargaygaygtnmgnccngargcnytnmgnmgnttygargcnatggtngargargtngcnmgncargcnwsngargcnwsnmgnaaygcnacngcngcnggncargcnwsngarcargcn

SEQ ID NO: 781 - DNA, 399 bp, Artificial Sequence
  PfN-CNA75
  misc_feature (3)..(3): n is a, c, g, or t
  misc_feature (6)..(6): n is a, c, g, or t
  misc_feature (9)..(9): n is a, c, g, or t
  misc_feature (15)..(15): n is a, c, g, or t
  misc_feature (18)..(18): n is a, c, g, or t
  misc_feature (21)..(21): n is a, c, g, or t
  misc_feature (24)..(24): n is a, c, g, or t
  misc_feature (33)..(33): n is a, c, g, or t
  misc_feature (36)..(36): n is a, c, g, or t
  misc_feature (39)..(39): n is a, c, g, or t
  misc_feature (42)..(42): n is a, c, g, or t
  misc_feature (45)..(45): n is a, c, g, or t
  misc_feature (48)..(48): n is a, c, g, or t
  misc_feature (60)..(60): n is a, c, g, or t
  misc_feature (69)..(69): n is a, c, g, or t
  misc_feature (75)..(75): n is a, c, g, or t
  misc_feature (81)..(81): n is a, c, g, or t
  misc_feature (84)..(84): n is a, c, g, or t
  misc_feature (87)..(87): n is a, c, g, or t
  misc_feature (90)..(90): n is a, c, g, or t
  misc_feature (93)..(93): n is a, c, g, or t
  misc_feature (96)..(96): n is a, c, g, or t
  misc_feature (99)..(99): n is a, c, g, or t
  misc_feature (102)..(102): n is a, c, g, or t
  misc_feature (108)..(108): n is a, c, g, or t
  misc_feature (114)..(114): n is a, c, g, or t
  misc_feature (117)..(117): n is a, c, g, or t
  misc_feature (126)..(126): n is a, c, g, or t
  misc_feature (135)..(135): n is a, c, g, or t
  misc_feature (138)..(138): n is a, c, g, or t
  misc_feature (141)..(141): n is a, c, g, or t
  misc_feature (147)..(147): n is a, c, g, or t
  misc_feature (156)..(156): n is a, c, g, or t
  misc_feature (165)..(165): n is a, c, g, or t
  misc_feature (174)..(174): n is a, c, g, or t
  misc_feature (177)..(177): n is a, c, g, or t
  misc_feature (180)..(180): n is a, c, g, or t
  misc_feature (183)..(183): n is a, c, g, or t
  misc_feature (186)..(186): n is a, c, g, or t
  misc_feature (189)..(189): n is a, c, g, or t
  misc_feature (195)..(195): n is a, c, g, or t
  misc_feature (201)..(201): n is a, c, g, or t
  misc_feature (204)..(204): n is a, c, g, or t
  misc_feature (207)..(207): n is a, c, g, or t
  misc_feature (213)..(213): n is a, c, g, or t
  misc_feature (216)..(216): n is a, c, g, or t
  misc_feature (219)..(219): n is a, c, g, or t
  misc_feature (225)..(225): n is a, c, g, or t
  misc_feature (228)..(228): n is a, c, g, or t
  misc_feature (240)..(240): n is a, c, g, or t
  misc_feature (246)..(246): n is a, c, g, or t
  misc_feature (249)..(249): n is a, c, g, or t
  misc_feature (252)..(252): n is a, c, g, or t
  misc_feature (255)..(255): n is a, c, g, or t
  misc_feature (267)..(267): n is a, c, g, or t
  misc_feature (270)..(270): n is a, c, g, or t
  misc_feature (273)..(273): n is a, c, g, or t
  misc_feature (279)..(279): n is a, c, g, or t
  misc_feature (291)..(291): n is a, c, g, or t
  misc_feature (294)..(294): n is a, c, g, or t
  misc_feature (297)..(297): n is a, c, g, or t
  misc_feature (303)..(303): n is a, c, g, or t
  misc_feature (306)..(306): n is a, c, g, or t
  misc_feature (309)..(309): n is a, c, g, or t
  misc_feature (312)..(312): n is a, c, g, or t
  misc_feature (321)..(321): n is a, c, g, or t
  misc_feature (327)..(327): n is a, c, g, or t
  misc_feature (336)..(336): n is a, c, g, or t
  misc_feature (339)..(339): n is a, c, g, or t
  misc_feature (342)..(342): n is a, c, g, or t
  misc_feature (348)..(348): n is a, c, g, or t
  misc_feature (351)..(351): n is a, c, g, or t
  misc_feature (357)..(357): n is a, c, g, or t
  misc_feature (360)..(360): n is a, c, g, or t
  misc_feature (363)..(363): n is a, c, g, or t
  misc_feature (369)..(369): n is a, c, g, or t
  misc_feature (372)..(372): n is a, c, g, or t
  misc_feature (375)..(375): n is a, c, g, or t
  misc_feature (378)..(378): n is a, c, g, or t
  misc_feature (381)..(381): n is a, c, g, or t
  misc_feature (387)..(387): n is a, c, g, or t
  misc_feature (390)..(390): n is a, c, g, or t
  misc_feature (399)..(399): n is a, c, g, or t
ccngtnytnathwsnggngtnytnaargayggnacnggnacnccngtncaraaytgyacnathcarytnaargcntgymgnacnwsnacnacngtngtngtnaayacnatggcnwsngaraayccngaygaygcnggnmgntaywsnatggaygtngarcarggncartayacngtnacnytnytngtngarggntayccnccnwsncaygcnggngtnathacngtntaygaygaywsnaarccnggnacnytnaaygayttyytnggngcnatgacngargaygaygtnmgnccngargcnytnmgnmgnttygargcnatggtngargargtngcnmgncargcnwsngargcnwsnmgnaaygcnacngtngcnggncargcnwsngarcargcn

SEQ ID NO: 782 - DNA, 399 bp, Artificial Sequence
  PfN-CNA76
  misc_feature (3)..(3): n is a, c, g, or t
  misc_feature (6)..(6): n is a, c, g, or t
  misc_feature (9)..(9): n is a, c, g, or t
  misc_feature (15)..(15): n is a, c, g, or t
  misc_feature (18)..(18): n is a, c, g, or t
  misc_feature (21)..(21): n is a, c, g, or t
  misc_feature (24)..(24): n is a, c, g, or t
  misc_feature (33)..(33): n is a, c, g, or t
  misc_feature (36)..(36): n is a, c, g, or t
  misc_feature (39)..(39): n is a, c, g, or t
  misc_feature (42)..(42): n is a, c, g, or t
  misc_feature (45)..(45): n is a, c, g, or t
  misc_feature (48)..(48): n is a, c, g, or t
  misc_feature (60)..(60): n is a, c, g, or t
  misc_feature (69)..(69): n is a, c, g, or t
  misc_feature (75)..(75): n is a, c, g, or t
  misc_feature (81)..(81): n is a, c, g, or t
  misc_feature (84)..(84): n is a, c, g, or t
  misc_feature (87)..(87): n is a, c, g, or t
  misc_feature (90)..(90): n is a, c, g, or t
  misc_feature (93)..(93): n is a, c, g, or t
  misc_feature (96)..(96): n is a, c, g, or t
  misc_feature (99)..(99): n is a, c, g, or t
  misc_feature (102)..(102): n is a, c, g, or t
  misc_feature (108)..(108): n is a, c, g, or t
  misc_feature (111)..(111): n is a, c, g, or t
  misc_feature (114)..(114): n is a, c, g, or t
  misc_feature (117)..(117): n is a, c, g, or t
  misc_feature (126)..(126): n is a, c, g, or t
  misc_feature (135)..(135): n is a, c, g, or t
  misc_feature (138)..(138): n is a, c, g, or t
  misc_feature (141)..(141): n is a, c, g, or t
  misc_feature (147)..(147): n is a, c, g, or t
  misc_feature (156)..(156): n is a, c, g, or t
  misc_feature (165)..(165): n is a, c, g, or t
  misc_feature (174)..(174): n is a, c, g, or t
  misc_feature (177)..(177): n is a, c, g, or t
  misc_feature (180)..(180): n is a, c, g, or t
  misc_feature (183)..(183): n is a, c, g, or t
  misc_feature (186)..(186): n is a, c, g, or t
  misc_feature (189)..(189): n is a, c, g, or t
  misc_feature (195)..(195): n is a, c, g, or t
  misc_feature (201)..(201): n is a, c, g, or t
  misc_feature (204)..(204): n is a, c, g, or t
  misc_feature (207)..(207): n is a, c, g, or t
  misc_feature (213)..(213): n is a, c, g, or t
  misc_feature (216)..(216): n is a, c, g, or t
  misc_feature (219)..(219): n is a, c, g, or t
  misc_feature (225)..(225): n is a, c, g, or t
  misc_feature (228)..(228): n is a, c, g, or t
  misc_feature (240)..(240): n is a, c, g, or t
  misc_feature (246)..(246): n is a, c, g, or t
  misc_feature (249)..(249): n is a, c, g, or t
  misc_feature (252)..(252): n is a, c, g, or t
  misc_feature (255)..(255): n is a, c, g, or t
  misc_feature (267)..(267): n is a, c, g, or t
  misc_feature (270)..(270): n is a, c, g, or t
  misc_feature (273)..(273): n is a, c, g, or t
  misc_feature (279)..(279): n is a, c, g, or t
  misc_feature (291)..(291): n is a, c, g, or t
  misc_feature (294)..(294): n is a, c, g, or t
  misc_feature (297)..(297): n is a, c, g, or t
  misc_feature (303)..(303): n is a, c, g, or t
  misc_feature (306)..(306): n is a, c, g, or t
  misc_feature (309)..(309): n is a, c, g, or t
  misc_feature (312)..(312): n is a, c, g, or t
  misc_feature (321)..(321): n is a, c, g, or t
  misc_feature (327)..(327): n is a, c, g, or t
  misc_feature (336)..(336): n is a, c, g, or t
  misc_feature (339)..(339): n is a, c, g, or t
  misc_feature (342)..(342): n is a, c, g, or t
  misc_feature (348)..(348): n is a, c, g, or t
  misc_feature (351)..(351): n is a, c, g, or t
  misc_feature (357)..(357): n is a, c, g, or t
  misc_feature (360)..(360): n is a, c, g, or t
  misc_feature (363)..(363): n is a, c, g, or t
  misc_feature (369)..(369): n is a, c, g, or t
  misc_feature (372)..(372): n is a, c, g, or t
  misc_feature (375)..(375): n is a, c, g, or t
  misc_feature (378)..(378): n is a, c, g, or t
  misc_feature (381)..(381): n is a, c, g, or t
  misc_feature (387)..(387): n is a, c, g, or t
  misc_feature (390)..(390): n is a, c, g, or t
  misc_feature (399)..(399): n is a, c, g, or t
ccngtnytnathwsnggngtnytnaargayggngcnggnacnccngtncaraaytgyacnathcarytnaargcntgymgnacnwsnacnacngtngtngtnaayacngtngcnwsngaraayccngaygaygcnggnmgntaywsnatggaygtngarcarggncartaygcngtnacnytnytngtngarggntayccnccnwsncaygcnggngtnathacngtntaygaygaywsnaarccnggnacnytnaaygayttyytnggngcnatgacngargaygaygtnmgnccngargcnytnmgnmgnttygargcnatggtngargargtngcnmgncargcnwsngargcnytnmgnaaygcnacngcngcnggncargcnwsngarcargcn

SEQ ID NO: 783 - DNA, 399 bp, Artificial Sequence
  PfN-CNA77
  misc_feature (3)..(3): n is a, c, g, or t
  misc_feature (6)..(6): n is a, c, g, or t
  misc_feature (9)..(9): n is a, c, g, or t
  misc_feature (15)..(15): n is a, c, g, or t
  misc_feature (18)..(18): n is a, c, g, or t
  misc_feature (21)..(21): n is a, c, g, or t
  misc_feature (24)..(24): n is a, c, g, or t
  misc_feature (33)..(33): n is a, c, g, or t
  misc_feature (36)..(36): n is a, c, g, or t
  misc_feature (39)..(39): n is a, c, g, or t
  misc_feature (45)..(45): n is a, c, g, or t
  misc_feature (48)..(48): n is a, c, g, or t
  misc_feature (60)..(60): n is a, c, g, or t
  misc_feature (69)..(69): n is a, c, g, or t
  misc_feature (75)..(75): n is a, c, g, or t
  misc_feature (81)..(81): n is a, c, g, or t
  misc_feature (84)..(84): n is a, c, g, or t
  misc_feature (87)..(87): n is a, c, g, or t
  misc_feature (90)..(90): n is a, c, g, or t
  misc_feature (93)..(93): n is a, c, g, or t
  misc_feature (96)..(96): n is a, c, g, or t
  misc_feature (99)..(99): n is a, c, g, or t
  misc_feature (102)..(102): n is a, c, g, or t
  misc_feature (108)..(108): n is a, c, g, or t
  misc_feature (111)..(111): n is a, c, g, or t
  misc_feature (114)..(114): n is a, c, g, or t
  misc_feature (117)..(117): n is a, c, g, or t
  misc_feature (126)..(126): n is a, c, g, or t
  misc_feature (135)..(135): n is a, c, g, or t
  misc_feature (138)..(138): n is a, c, g, or t
  misc_feature (141)..(141): n is a, c, g, or t
  misc_feature (147)..(147): n is a, c, g, or t
  misc_feature (156)..(156): n is a, c, g, or t
  misc_feature (165)..(165): n is a, c, g, or t
  misc_feature (174)..(174): n is a, c, g, or t
  misc_feature (177)..(177): n is a, c, g, or t
  misc_feature (180)..(180): n is a, c, g, or t
  misc_feature (183)..(183): n is a, c, g, or t
  misc_feature (186)..(186): n is a, c, g, or t
  misc_feature (189)..(189): n is a, c, g, or t
  misc_feature (195)..(195): n is a, c, g, or t
  misc_feature (201)..(201): n is a, c, g, or t
  misc_feature (204)..(204): n is a, c, g, or t
  misc_feature (207)..(207): n is a, c, g, or t
  misc_feature (210)..(210): n is a, c, g, or t
  misc_feature (213)..(213): n is a, c, g, or t
  misc_feature (216)..(216): n is a, c, g, or t
  misc_feature (219)..(219): n is a, c, g, or t
  misc_feature (225)..(225): n is a, c, g, or t
  misc_feature (228)..(228): n is a, c, g, or t
  misc_feature (234)..(234): n is a, c, g, or t
  misc_feature (240)..(240): n is a, c, g, or t
  misc_feature (246)..(246): n is a, c, g, or t
  misc_feature (249)..(249): n is a, c, g, or t
  misc_feature (252)..(252): n is a, c, g, or t
  misc_feature (255)..(255): n is a, c, g, or t
  misc_feature (267)..(267): n is a, c, g, or t
  misc_feature (270)..(270): n is a, c, g, or t
  misc_feature (273)..(273): n is a, c, g, or t
  misc_feature (279)..(279): n is a, c, g, or t
  misc_feature (291)..(291): n is a, c, g, or t
  misc_feature (294)..(294): n is a, c, g, or t
  misc_feature (297)..(297): n is a, c, g, or t
  misc_feature (303)..(303): n is a, c, g, or t
  misc_feature (306)..(306): n is a, c, g, or t
  misc_feature (309)..(309): n is a, c, g, or t
  misc_feature (312)..(312): n is a, c, g, or t
  misc_feature (321)..(321): n is a, c, g, or t
  misc_feature (327)..(327): n is a, c, g, or t
  misc_feature (336)..(336): n is a, c, g, or t
  misc_feature (339)..(339): n is a, c, g, or t
  misc_feature (342)..(342): n is a, c, g, or t
  misc_feature (348)..(348): n is a, c, g, or t
  misc_feature (351)..(351): n is a, c, g, or t
  misc_feature (357)..(357): n is a, c, g, or t
  misc_feature (360)..(360): n is a, c, g, or t
  misc_feature (363)..(363): n is a, c, g, or t
  misc_feature (369)..(369): n is a, c, g, or t
  misc_feature (372)..(372): n is a, c, g, or t
  misc_feature (375)..(375): n is a, c, g, or t
  misc_feature (378)..(378): n is a, c, g, or t
  misc_feature (381)..(381): n is a, c, g, or t
  misc_feature (387)..(387): n is a, c, g, or t
  misc_feature (390)..(390): n is a, c, g, or t
  misc_feature (399)..(399): n is a, c, g, or t
ccngtnytnathwsnggngtnytnaargayggnacnggnatgccngtncaraaytgyacnathcarytnaargcntgymgnacnwsnacngcngtngtngtnaayacngtngcnwsngaraayccngaygargcnggnmgntaywsnatggaygtngarcarggncartayacngtnacnytnytngtngarggntayccnccnwsnccngcnggngtnathacngtntaygtngaywsnaarccnggnacnytnaaygayttyytnggngcnatgacngargaygaygtnmgnccngargcnytnmgnmgnttygargcnatggtngargargtngcnmgncargcnwsngargcnwsnmgnaaygcnacngcngcnggncargcnwsngarcargcn

SEQ ID NO: 784 - DNA, 399 bp, Artificial Sequence
  PfN-CNA78
  misc_feature (3)..(3): n is a, c, g, or t
  misc_feature (15)..(15): n is a, c, g, or t
  misc_feature (18)..(18): n is a, c, g, or t
  misc_feature (24)..(24): n is a, c, g, or t
  misc_feature (27)..(27): n is a, c, g, or t
  misc_feature (30)..(30): n is a, c, g, or t
  misc_feature (33)..(33): n is a, c, g, or t
  misc_feature (36)..(36): n is a, c, g, or t
  misc_feature (39)..(39): n is a, c, g, or t
  misc_feature (45)..(45): n is a, c, g, or t
  misc_feature (48)..(48): n is a, c, g, or t
  misc_feature (51)..(51): n is a, c, g, or t
  misc_feature (60)..(60): n is a, c, g, or t
  misc_feature (66)..(66): n is a, c, g, or t
  misc_feature (69)..(69): n is a, c, g, or t
  misc_feature (72)..(72): n is a, c, g, or t
  misc_feature (75)..(75): n is a, c, g, or t
  misc_feature (84)..(84): n is a, c, g, or t
  misc_feature (87)..(87): n is a, c, g, or t
  misc_feature (90)..(90): n is a, c, g, or t
  misc_feature (93)..(93): n is a, c, g, or t
  misc_feature (96)..(96): n is a, c, g, or t
  misc_feature (102)..(102): n is a, c, g, or t
  misc_feature (105)..(105): n is a, c, g, or t
  misc_feature (108)..(108): n is a, c, g, or t
  misc_feature (114)..(114): n is a, c, g, or t
  misc_feature (120)..(120): n is a, c, g, or t
  misc_feature (126)..(126): n is a, c, g, or t
  misc_feature (129)..(129): n is a, c, g, or t
  misc_feature (132)..(132): n is a, c, g, or t
  misc_feature (138)..(138): n is a, c, g, or t
  misc_feature (141)..(141): n is a, c, g, or t
  misc_feature (147)..(147): n is a, c, g, or t
  misc_feature (150)..(150): n is a, c, g, or t
  misc_feature (156)..(156): n is a, c, g, or t
  misc_feature (162)..(162): n is a, c, g, or t
  misc_feature (165)..(165): n is a, c, g, or t
  misc_feature (177)..(177): n is a, c, g, or t
  misc_feature (180)..(180): n is a, c, g, or t
  misc_feature (183)..(183): n is a, c, g, or t
  misc_feature (189)..(189): n is a, c, g, or t
  misc_feature (195)..(195): n is a, c, g, or t
  misc_feature (204)..(204): n is a, c, g, or t
  misc_feature (207)..(207): n is a, c, g, or t
  misc_feature (210)..(210): n is a, c, g, or t
  misc_feature (213)..(213): n is a, c, g, or t
  misc_feature (216)..(216): n is a, c, g, or t
  misc_feature (219)..(219): n is a, c, g, or t
  misc_feature (228)..(228): n is a, c, g, or t
  misc_feature (234)..(234): n is a, c, g, or t
  misc_feature (240)..(240): n is a, c, g, or t
  misc_feature (243)..(243): n is a, c, g, or t
  misc_feature (246)..(246): n is a, c, g, or t
  misc_feature (249)..(249): n is a, c, g, or t
  misc_feature (252)..(252): n is a, c, g, or t
  misc_feature (255)..(255): n is a, c, g, or t
  misc_feature (267)..(267): n is a, c, g, or t
  misc_feature (270)..(270): n is a, c, g, or t
  misc_feature (273)..(273): n is a, c, g, or t
  misc_feature (276)..(276): n is a, c, g, or t
  misc_feature (279)..(279): n is a, c, g, or t
  misc_feature (291)..(291): n is a, c, g, or t
  misc_feature (294)..(294): n is a, c, g, or t
  misc_feature (297)..(297): n is a, c, g, or t
  misc_feature (309)..(309): n is a, c, g, or t
  misc_feature (315)..(315): n is a, c, g, or t
  misc_feature (324)..(324): n is a, c, g, or t
  misc_feature (327)..(327): n is a, c, g, or t
  misc_feature (330)..(330): n is a, c, g, or t
  misc_feature (336)..(336): n is a, c, g, or t
  misc_feature (339)..(339): n is a, c, g, or t
  misc_feature (342)..(342): n is a, c, g, or t
  misc_feature (345)..(345): n is a, c, g, or t
  misc_feature (348)..(348): n is a, c, g, or t
  misc_feature (351)..(351): n is a, c, g, or t
  misc_feature (357)..(357): n is a, c, g, or t
  misc_feature (366)..(366): n is a, c, g, or t
  misc_feature (378)..(378): n is a, c, g, or t
  misc_feature (381)..(381): n is a, c, g, or t
  misc_feature (390)..(390): n is a, c, g, or t
  misc_feature (393)..(393): n is a, c, g, or t
  misc_feature (399)..(399): n is a, c, g, or t
wsnathaarathwsnggnathytnccnggnccnacnggngarccngcngcncayathggnathacnytnmgngcnathaaracnwsnytnacngtnathacnacnytngarwsnaaywsnathacnggnacngayggngcntaywsnytnaaygtngarccnggnaartaygaygtnytnytntgggtngayggnathaaygcnmgnmgngtnggnacnathaaygtntaywsngaywsnytnccnggnacnytnaayaayttyytnacngcnytnmgngargargayggnacnccngarathathytncarytngarcarytnmgngcngargcngtnmgngcngcnytngargcnaargarwsnaaraaygargcnacncarcargcnggnathgcn

SEQ ID NO: 785 - DNA, 399 bp, Artificial Sequence
  PfN-CNA79
  misc_feature (3)..(3): n is a, c, g, or t
  misc_feature (6)..(6): n is a, c, g, or t
  misc_feature (9)..(9): n is a, c, g, or t
  misc_feature (12)..(12): n is a, c, g, or t
  misc_feature (15)..(15): n is a, c, g, or t
  misc_feature (18)..(18): n is a, c, g, or t
  misc_feature (21)..(21): n is a, c, g, or t
  misc_feature (24)..(24): n is a, c, g, or t
  misc_feature (30)..(30): n is a, c, g, or t
  misc_feature (33)..(33): n is a, c, g, or t
  misc_feature (39)..(39): n is a, c, g, or t
  misc_feature (45)..(45): n is a, c, g, or t
  misc_feature (51)..(51): n is a, c, g, or t
  misc_feature (54)..(54): n is a, c, g, or t
  misc_feature (57)..(57): n is a, c, g, or t
  misc_feature (66)..(66): n is a, c, g, or t
  misc_feature (69)..(69): n is a, c, g, or t
  misc_feature (72)..(72): n is a, c, g, or t
  misc_feature (75)..(75): n is a, c, g, or t
  misc_feature (78)..(78): n is a, c, g, or t
  misc_feature (81)..(81): n is a, c, g, or t
  misc_feature (84)..(84): n is a, c, g, or t
  misc_feature (87)..(87): n is a, c, g, or t
  misc_feature (90)..(90): n is a, c, g, or t
  misc_feature (96)..(96): n is a, c, g, or t
  misc_feature (99)..(99): n is a, c, g, or t
  misc_feature (102)..(102): n is a, c, g, or t
  misc_feature (105)..(105): n is a, c, g, or t
  misc_feature (108)..(108): n is a, c, g, or t
  misc_feature (111)..(111): n is a, c, g, or t
  misc_feature (114)..(114): n is a, c, g, or t
  misc_feature (117)..(117): n is a, c, g, or t
  misc_feature (120)..(120): n is a, c, g, or t
  misc_feature (123)..(123): n is a, c, g, or t
  misc_feature (126)..(126): n is a, c, g, or t
  misc_feature (129)..(129): n is a, c, g, or t
  misc_feature (135)..(135): n is a, c, g, or t
  misc_feature (138)..(138): n is a, c, g, or t
  misc_feature (147)..(147): n is a, c, g, or t
  misc_feature (153)..(153): n is a, c, g, or t
  misc_feature (162)..(162): n is a, c, g, or t
  misc_feature (165)..(165): n is a, c, g, or t
  misc_feature (174)..(174): n is a, c, g, or t
  misc_feature (177)..(177): n is a, c, g, or t
  misc_feature (180)..(180): n is a, c, g, or t
  misc_feature (183)..(183): n is a, c, g, or t
  misc_feature (186)..(186): n is a, c, g, or t
  misc_feature (189)..(189): n is a, c, g, or t
  misc_feature (195)..(195): n is a, c, g, or t
  misc_feature (201)..(201): n is a, c, g, or t
  misc_feature (204)..(204): n is a, c, g, or t
  misc_feature (207)..(207): n is a, c, g, or t
  misc_feature (213)..(213): n is a, c, g, or t
  misc_feature (216)..(216): n is a, c, g, or t
  misc_feature (219)..(219): n is a, c, g, or t
  misc_feature (222)..(222): n is a, c, g, or t
  misc_feature (231)..(231): n is a, c, g, or t
  misc_feature (234)..(234): n is a, c, g, or t
  misc_feature (240)..(240): n is a, c, g, or t
  misc_feature (243)..(243): n is a, c, g, or t
  misc_feature (246)..(246): n is a, c, g, or t
  misc_feature (249)..(249): n is a, c, g, or t
  misc_feature (252)..(252): n is a, c, g, or t
  misc_feature (261)..(261): n is a, c, g, or t
  misc_feature (264)..(264): n is a, c, g, or t
  misc_feature (267)..(267): n is a, c, g, or t
  misc_feature (270)..(270): n is a, c, g, or t
  misc_feature (273)..(273): n is a, c, g, or t
  misc_feature (276)..(276): n is a, c, g, or t
  misc_feature (279)..(279): n is a, c, g, or t
  misc_feature (285)..(285): n is a, c, g, or t
  misc_feature (288)..(288): n is a, c, g, or t
  misc_feature (294)..(294): n is a, c, g, or t
  misc_feature (297)..(297): n is a, c, g, or t
  misc_feature (303)..(303): n is a, c, g, or t
  misc_feature (306)..(306): n is a, c, g, or t
  misc_feature (309)..(309): n is a, c, g, or t
  misc_feature (318)..(318): n is a, c, g, or t
  misc_feature (336)..(336): n is a, c, g, or t
  misc_feature (339)..(339): n is a, c, g, or t
  misc_feature (348)..(348): n is a, c, g, or t
  misc_feature (351)..(351): n is a, c, g, or t
  misc_feature (354)..(354): n is a, c, g, or t
  misc_feature (360)..(360): n is a, c, g, or t
  misc_feature (363)..(363): n is a, c, g, or t
  misc_feature (366)..(366): n is a, c, g, or t
  misc_feature (378)..(378): n is a, c, g, or t
  misc_feature (381)..(381): n is a, c, g, or t
  misc_feature (384)..(384): n is a, c, g, or t
  misc_feature (393)..(393): n is a, c, g, or t
  misc_feature (399)..(399): n is a, c, g, or t
wsngtngtngtnwsnggnacnytnaarwsnccngayggngargcnathwsnggngcnaayathacnytnacngcnytnacngtnwsnccngaygcnytnwsnggnacnwsngcnwsngcngtnacnmgngarggnggntaytayggnatgacnatggayccnggngartaygcngtnwsngtnacngtnaarggnaaracngtngtntayggnmgngtnmgnathgarggnacngarwsnacngtnacnytnaayatgytnytnmgnmgnwsnytngtngargtnwsnathccnggngarytnytnacngayttymgncarathcaraayaaygtngcngaygayytngcnacnathmgnmgnytnaaygargayacngcnacnaaraayacncargcn

SEQ ID NO: 786 - DNA, 399 bp, Artificial Sequence
  PfN-CNA80
  misc_feature (3)..(3): n is a, c, g, or t
  misc_feature (6)..(6): n is a, c, g, or t
  misc_feature (9)..(9): n is a, c, g, or t
  misc_feature (12)..(12): n is a, c, g, or t
  misc_feature (15)..(15): n is a, c, g, or t
  misc_feature (18)..(18): n is a, c, g, or t
  misc_feature (21)..(21): n is a, c, g, or t
  misc_feature (24)..(24): n is a, c, g, or t
  misc_feature (30)..(30): n is a, c, g, or t
  misc_feature (33)..(33): n is a, c, g, or t
  misc_feature (39)..(39): n is a, c, g, or t
  misc_feature (45)..(45): n is a, c, g, or t
  misc_feature (51)..(51): n is a, c, g, or t
  misc_feature (54)..(54): n is a, c, g, or t
  misc_feature (57)..(57): n is a, c, g, or t
  misc_feature (66)..(66): n is a, c, g, or t
  misc_feature (69)..(69): n is a, c, g, or t
  misc_feature (72)..(72): n is a, c, g, or t
  misc_feature (75)..(75): n is a, c, g, or t
  misc_feature (78)..(78): n is a, c, g, or t
  misc_feature (81)..(81): n is a, c, g, or t
  misc_feature (84)..(84): n is a, c, g, or t
  misc_feature (87)..(87): n is a, c, g, or t
  misc_feature (90)..(90): n is a, c, g, or t
  misc_feature (96)..(96): n is a, c, g, or t
  misc_feature (99)..(99): n is a, c, g, or t
  misc_feature (102)..(102): n is a, c, g, or t
  misc_feature (105)..(105): n is a, c, g, or t
  misc_feature (108)..(108): n is a, c, g, or t
  misc_feature (111)..(111): n is a, c, g, or t
  misc_feature (114)..(114): n is a, c, g, or t
  misc_feature (117)..(117): n is a, c, g, or t
  misc_feature (120)..(120): n is a, c, g, or t
  misc_feature (123)..(123): n is a, c, g, or t
  misc_feature (126)..(126): n is a, c, g, or t
  misc_feature (129)..(129): n is a, c, g, or t
  misc_feature (135)..(135): n is a, c, g, or t
  misc_feature (138)..(138): n is a, c, g, or t
  misc_feature (147)..(147): n is a, c, g, or t
  misc_feature (153)..(153): n is a, c, g, or t
  misc_feature (162)..(162): n is a, c, g, or t
  misc_feature (165)..(165): n is a, c, g, or t
  misc_feature (174)..(174): n is a, c, g, or t
  misc_feature (177)..(177): n is a, c, g, or t
  misc_feature (180)..(180): n is a, c, g, or t
  misc_feature (183)..(183): n is a, c, g, or t
  misc_feature (186)..(186): n is a, c, g, or t
  misc_feature (189)..(189): n is a, c, g, or t
  misc_feature (195)..(195): n is a, c, g, or t
  misc_feature (201)..(201): n is a, c, g, or t
  misc_feature (204)..(204): n is a, c, g, or t
  misc_feature (207)..(207): n is a, c, g, or t
  misc_feature (213)..(213): n is a, c, g, or t
  misc_feature (216)..(216): n is a, c, g, or t
  misc_feature (219)..(219): n is a, c, g, or t
  misc_feature (222)..(222): n is a, c, g, or t
  misc_feature (231)..(231): n is a, c, g, or t
  misc_feature (234)..(234): n is a, c, g, or t
  misc_feature (240)..(240): n is a, c, g, or t
  misc_feature (243)..(243): n is a, c, g, or t
  misc_feature (246)..(246): n is a, c, g, or t
  misc_feature (249)..(249): n is a, c, g, or t
  misc_feature (252)..(252): n is a, c, g, or t
  misc_feature (261)..(261): n is a, c, g, or t
  misc_feature (264)..(264): n is a, c, g, or t
  misc_feature (267)..(267): n is a, c, g, or t
  misc_feature (270)..(270): n is a, c, g, or t
  misc_feature (273)..(273): n is a, c, g, or t
  misc_feature (276)..(276): n is a, c, g, or t
  misc_feature (279)..(279): n is a, c, g, or t
  misc_feature (285)..(285): n is a, c, g, or t
  misc_feature (288)..(288): n is a, c, g, or t
  misc_feature (294)..(294): n is a, c, g, or t
  misc_feature (297)..(297): n is a, c, g, or t
  misc_feature (303)..(303): n is a, c, g, or t
  misc_feature (306)..(306): n is a, c, g, or t
  misc_feature (309)..(309): n is a, c, g, or t
  misc_feature (318)..(318): n is a, c, g, or t
  misc_feature (336)..(336): n is a, c, g, or t
  misc_feature (339)..(339): n is a, c, g, or t
  misc_feature (348)..(348): n is a, c, g, or t
  misc_feature (351)..(351): n is a, c, g, or t
  misc_feature (354)..(354): n is a, c, g, or t
  misc_feature (360)..(360): n is a, c, g, or t
  misc_feature (363)..(363): n is a, c, g, or t
  misc_feature (366)..(366): n is a, c, g, or t
  misc_feature (378)..(378): n is a, c, g, or t
  misc_feature (381)..(381): n is a, c, g, or t
  misc_feature (384)..(384): n is a, c, g, or t
  misc_feature (393)..(393): n is a, c, g, or t
  misc_feature (399)..(399): n is a, c, g, or t
wsngtngtngtnwsnggnacnytnaarwsnccngayggngargcnathwsnggngcnaayathacnytnacngcnytnacngtnwsnccngaygcnytnwsnggnacnwsngcnwsngcngtnacnmgngarggnggntaytayggnatgacnatggayccnggngartaygcngtnwsngtnacngtnaarggnaaracngcngtntayggnmgngtnmgnathgarggnacngarwsnacngtnacnytnaayatgytnytnmgnmgnwsnytngtngargtnwsnathccnggngarytnytnacngayttymgncarathcaraayaaygtngcngaygayytngcnacnathmgnmgnytnaaygargayacngcnacnaaraayacncargcn

SEQ ID NO: 787 - DNA, 399 bp, Artificial Sequence
  PfN-CNA81
  misc_feature (3)..(3): n is a, c, g, or t
  misc_feature (6)..(6): n is a, c, g, or t
  misc_feature (9)..(9): n is a, c, g, or t
  misc_feature (12)..(12): n is a, c, g, or t
  misc_feature (15)..(15): n is a, c, g, or t
  misc_feature (18)..(18): n is a, c, g, or t
  misc_feature (21)..(21): n is a, c, g, or t
  misc_feature (24)..(24): n is a, c, g, or t
  misc_feature (30)..(30): n is a, c, g, or t
  misc_feature (33)..(33): n is a, c, g, or t
  misc_feature (39)..(39): n is a, c, g, or t
  misc_feature (45)..(45): n is a, c, g, or t
  misc_feature (51)..(51): n is a, c, g, or t
  misc_feature (54)..(54): n is a, c, g, or t
  misc_feature (57)..(57): n is a, c, g, or t
  misc_feature (66)..(66): n is a, c, g, or t
  misc_feature (69)..(69): n is a, c, g, or t
  misc_feature (72)..(72): n is a, c, g, or t
  misc_feature (75)..(75): n is a, c, g, or t
  misc_feature (78)..(78): n is a, c, g, or t
  misc_feature (81)..(81): n is a, c, g, or t
  misc_feature (84)..(84): n is a, c, g, or t
  misc_feature (87)..(87): n is a, c, g, or t
  misc_feature (90)..(90): n is a, c, g, or t
  misc_feature (96)..(96): n is a, c, g, or t
  misc_feature (99)..(99): n is a, c, g, or t
  misc_feature (102)..(102): n is a, c, g, or t
  misc_feature (105)..(105): n is a, c, g, or t
  misc_feature (108)..(108): n is a, c, g, or t
  misc_feature (111)..(111): n is a, c, g, or t
  misc_feature (114)..(114): n is a, c, g, or t
  misc_feature (117)..(117): n is a, c, g, or t
  misc_feature (120)..(120): n is a, c, g, or t
  misc_feature (123)..(123): n is a, c, g, or t
  misc_feature (126)..(126): n is a, c, g, or t
  misc_feature (129)..(129): n is a, c, g, or t
  misc_feature (135)..(135): n is a, c, g, or t
  misc_feature (138)..(138): n is a, c, g, or t
  misc_feature (147)..(147): n is a, c, g, or t
  misc_feature (153)..(153): n is a, c, g, or t
  misc_feature (162)..(162): n is a, c, g, or t
  misc_feature (165)..(165): n is a, c, g, or t
  misc_feature (174)..(174): n is a, c, g, or t
  misc_feature (177)..(177): n is a, c, g, or t
  misc_feature (180)..(180): n is a, c, g, or t
  misc_feature (183)..(183): n is a, c, g, or t
  misc_feature (186)..(186): n is a, c, g, or t
  misc_feature (189)..(189): n is a, c, g, or t
  misc_feature (195)..(195): n is a, c, g, or t
  misc_feature (201)..(201): n is a, c, g, or t
  misc_feature (204)..(204): n is a, c, g, or t
  misc_feature (207)..(207): n is a, c, g, or t
  misc_feature (213)..(213): n is a, c, g, or t
  misc_feature (216)..(216): n is a, c, g, or t
  misc_feature (219)..(219): n is a, c, g, or t
  misc_feature (222)..(222): n is a, c, g, or t
  misc_feature (231)..(231): n is a, c, g, or t
  misc_feature (234)..(234): n is a, c, g, or t
  misc_feature (240)..(240): n is a, c, g, or t
  misc_feature (243)..(243): n is a, c, g, or t
  misc_feature (246)..(246): n is a, c, g, or t
  misc_feature (249)..(249): n is a, c, g, or t
  misc_feature (252)..(252): n is a, c, g, or t
  misc_feature (261)..(261): n is a, c, g, or t
  misc_feature (264)..(264): n is a, c, g, or t
  misc_feature (267)..(267): n is a, c, g, or t
  misc_feature (270)..(270): n is a, c, g, or t
  misc_feature (273)..(273): n is a, c, g, or t
  misc_feature (276)..(276): n is a, c, g, or t
  misc_feature (279)..(279): n is a, c, g, or t
  misc_feature (285)..(285): n is a, c, g, or t
  misc_feature (288)..(288): n is a, c, g, or t
  misc_feature (294)..(294): n is a, c, g, or t
  misc_feature (297)..(297): n is a, c, g, or t
  misc_feature (303)..(303): n is a, c, g, or t
  misc_feature (306)..(306): n is a, c, g, or t
  misc_feature (309)..(309): n is a, c, g, or t
  misc_feature (318)..(318): n is a, c, g, or t
  misc_feature (336)..(336): n is a, c, g, or t
  misc_feature (339)..(339): n is a, c, g, or t
  misc_feature (348)..(348): n is a, c, g, or t
  misc_feature (351)..(351): n is a, c, g, or t
  misc_feature (354)..(354): n is a, c, g, or t
  misc_feature (360)..(360): n is a, c, g, or t
  misc_feature (363)..(363): n is a, c, g, or t
  misc_feature (366)..(366): n is a, c, g, or t
  misc_feature (378)..(378): n is a, c, g, or t
  misc_feature (381)..(381): n is a, c, g, or t
  misc_feature (384)..(384): n is a, c, g, or t
  misc_feature (396)..(396): n is a, c, g, or t
  misc_feature (399)..(399): n is a, c, g, or t
wsngtngtngtnwsnggnacnytnaarwsnccngayggngargcnathwsnggngcnaayathacnytnacngcnytnacngtnwsnccngaygcnytnwsnggnacnwsngcnwsngcngtnacnmgngarggnggntaytayggnatgacnatggayccnggngartaygcngtnwsngtnacngtnaarggnaaracngcngtntayggnmgngtnmgnathgarggnacngarwsnacngtnacnytnaayatgytnytnmgnmgnwsnytngtngargtnwsnathccnggngarytnytnacngayttymgncarathcaraayaaygtngcngaygayytngcnacnathmgnmgnytnaaygargayacngcnacnaaraayaaywsnggn

SEQ ID NO: 788 - DNA, 399 bp, Artificial Sequence
  PfN-CNA82
  misc_feature (3)..(3): n is a, c, g, or t
  misc_feature (6)..(6): n is a, c, g, or t
  misc_feature (9)..(9): n is a, c, g, or t
  misc_feature (12)..(12): n is a, c, g, or t
  misc_feature (15)..(15): n is a, c, g, or t
  misc_feature (18)..(18): n is a, c, g, or t
  misc_feature (21)..(21): n is a, c, g, or t
  misc_feature (24)..(24): n is a, c, g, or t
  misc_feature (30)..(30): n is a, c, g, or t
  misc_feature (33)..(33): n is a, c, g, or t
  misc_feature (39)..(39): n is a, c, g, or t
  misc_feature (45)..(45): n is a, c, g, or t
  misc_feature (51)..(51): n is a, c, g, or t
  misc_feature (54)..(54): n is a, c, g, or t
  misc_feature (57)..(57): n is a, c, g, or t
  misc_feature (66)..(66): n is a, c, g, or t
  misc_feature (69)..(69): n is a, c, g, or t
  misc_feature (72)..(72): n is a, c, g, or t
  misc_feature (75)..(75): n is a, c, g, or t
  misc_feature (78)..(78): n is a, c, g, or t
  misc_feature (81)..(81): n is a, c, g, or t
  misc_feature (84)..(84): n is a, c, g, or t
  misc_feature (87)..(87): n is a, c, g, or t
  misc_feature (90)..(90): n is a, c, g, or t
  misc_feature (96)..(96): n is a, c, g, or t
  misc_feature (99)..(99): n is a, c, g, or t
  misc_feature (102)..(102): n is a, c, g, or t
  misc_feature (105)..(105): n is a, c, g, or t
  misc_feature (108)..(108): n is a, c, g, or t
  misc_feature (111)..(111): n is a, c, g, or t
  misc_feature (114)..(114): n is a, c, g, or t
  misc_feature (117)..(117): n is a, c, g, or t
  misc_feature (120)..(120): n is a, c, g, or t
  misc_feature (123)..(123): n is a, c, g, or t
  misc_feature (126)..(126): n is a, c, g, or t
  misc_feature (129)..(129): n is a, c, g, or t
  misc_feature (135)..(135): n is a, c, g, or t
  misc_feature (138)..(138): n is a, c, g, or t
  misc_feature (147)..(147): n is a, c, g, or t
  misc_feature (153)..(153): n is a, c, g, or t
  misc_feature (156)..(156): n is a, c, g, or t
  misc_feature (162)..(162): n is a, c, g, or t
  misc_feature (165)..(165): n is a, c, g, or t
  misc_feature (174)..(174): n is a, c, g, or t
  misc_feature (177)..(177): n is a, c, g, or t
  misc_feature (180)..(180): n is a, c, g, or t
  misc_feature (183)..(183): n is a, c, g, or t
  misc_feature (186)..(186): n is a, c, g, or t
  misc_feature (189)..(189): n is a, c, g, or t
  misc_feature (195)..(195): n is a, c, g, or t
  misc_feature (201)..(201): n is a, c, g, or t
  misc_feature (204)..(204): n is a, c, g, or t
  misc_feature (207)..(207): n is a, c, g, or t
  misc_feature (213)..(213): n is a, c, g, or t
  misc_feature (216)..(216): n is a, c, g, or t
  misc_feature (219)..(219): n is a, c, g, or t
  misc_feature (222)..(222): n is a, c, g, or t
  misc_feature (231)..(231): n is a, c, g, or t
  misc_feature (234)..(234): n is a, c, g, or t
  misc_feature (240)..(240): n is a, c, g, or t
  misc_feature (243)..(243): n is a, c, g, or t
  misc_feature (246)..(246): n is a, c, g, or t
  misc_feature (249)..(249): n is a, c, g, or t
  misc_feature (252)..(252): n is a, c, g, or t
  misc_feature (261)..(261): n is a, c, g, or t
  misc_feature (264)..(264): n is a, c, g, or t
  misc_feature (267)..(267): n is a, c, g, or t
  misc_feature (270)..(270): n is a, c, g, or t
  misc_feature (273)..(273): n is a, c, g, or t
  misc_feature (276)..(276): n is a, c, g, or t
  misc_feature (279)..(279): n is a, c, g, or t
  misc_feature (285)..(285): n is a, c, g, or t
  misc_feature (288)..(288): n is a, c, g, or t
  misc_feature (294)..(294): n is a, c, g, or t
  misc_feature (297)..(297): n is a, c, g, or t
  misc_feature (303)..(303): n is a, c, g, or t
  misc_feature (306)..(306): n is a, c, g, or t
  misc_feature (309)..(309): n is a, c, g, or t
  misc_feature (318)..(318): n is a, c, g, or t
  misc_feature (336)..(336): n is a, c, g, or t
  misc_feature (339)..(339): n is a, c, g, or t
  misc_feature (348)..(348): n is a, c, g, or t
  misc_feature (351)..(351): n is a, c, g, or t
  misc_feature (354)..(354): n is a, c, g, or t
  misc_feature (360)..(360): n is a, c, g, or t
  misc_feature (363)..(363): n is a, c, g, or t
  misc_feature (366)..(366): n is a, c, g, or t
  misc_feature (378)..(378): n is a, c, g, or t
  misc_feature (381)..(381): n is a, c, g, or t
  misc_feature (384)..(384): n is a, c, g, or t
  misc_feature (399)..(399): n is a, c, g, or t
wsngtngtngtnwsnggnacnytnaarwsnccngayggngargcnathwsnggngcnaayathacnytnacngcnytnacngtnwsnccngaygcnytnwsnggnacnwsngcnwsngcngtnacnmgngayggnggntaytayggnatgacnytngarccnggngartaygcngtnwsngtnacngtnaarggnaaracngcngtntayggnmgngtnmgnathgarggnacngarwsnacngtnacnytnaayatgytnytnmgnmgnwsnytngtngargtnwsnathccnggngarytnytnacngayttymgncarathcaraayaaygtngcngaygayytngcnacnathmgnmgnytnaaygargayacngcngtnaaraayaaycargcn

SEQ ID NO: 789 - DNA, 390 bp, Artificial Sequence
  PfN-CNA83
  misc_feature (3)..(3): n is a, c, g, or t
  misc_feature (6)..(6): n is a, c, g, or t
  misc_feature (9)..(9): n is a, c, g, or t
  misc_feature (12)..(12): n is a, c, g, or t
  misc_feature (15)..(15): n is a, c, g, or t
  misc_feature (18)..(18): n is a, c, g, or t
  misc_feature (21)..(21): n is a, c, g, or t
  misc_feature (24)..(24): n is a, c, g, or t
  misc_feature (30)..(30): n is a, c, g, or t
  misc_feature (33)..(33): n is a, c, g, or t
  misc_feature (39)..(39): n is a, c, g, or t
  misc_feature (45)..(45): n is a, c, g, or t
  misc_feature (48)..(48): n is a, c, g, or t
  misc_feature (51)..(51): n is a, c, g, or t
  misc_feature (57)..(57): n is a, c, g, or t
  misc_feature (66)..(66): n is a, c, g, or t
  misc_feature (69)..(69): n is a, c, g, or t
  misc_feature (72)..(72): n is a, c, g, or t
  misc_feature (75)..(75): n is a, c, g, or t
  misc_feature (78)..(78): n is a, c, g, or t
  misc_feature (81)..(81): n is a, c, g, or t
  misc_feature (84)..(84): n is a, c, g, or t
  misc_feature (87)..(87): n is a, c, g, or t
  misc_feature (90)..(90): n is a, c, g, or t
  misc_feature (96)..(96): n is a, c, g, or t
  misc_feature (99)..(99): n is a, c, g, or t
  misc_feature (102)..(102): n is a, c, g, or t
  misc_feature (105)..(105): n is a, c, g, or t
  misc_feature (108)..(108): n is a, c, g, or t
  misc_feature (111)..(111): n is a, c, g, or t
  misc_feature (114)..(114): n is a, c, g, or t
  misc_feature (117)..(117): n is a, c, g, or t
  misc_feature (120)..(120): n is a, c, g, or t
  misc_feature (123)..(123): n is a, c, g, or t
  misc_feature (126)..(126): n is a, c, g, or t
  misc_feature (129)..(129): n is a, c, g, or t
  misc_feature (132)..(132): n is a, c, g, or t
  misc_feature (135)..(135): n is a, c, g, or t
  misc_feature (138)..(138): n is a, c, g, or t
  misc_feature (147)..(147): n is a, c, g, or t
  misc_feature (153)..(153): n is a, c, g, or t
  misc_feature (162)..(162): n is a, c, g, or t
  misc_feature (165)..(165): n is a, c, g, or t
  misc_feature (174)..(174): n is a, c, g, or t
  misc_feature (177)..(177): n is a, c, g, or t
  misc_feature (180)..(180): n is a, c, g, or t
  misc_feature (183)..(183): n is a, c, g, or t
  misc_feature (186)..(186): n is a, c, g, or t
  misc_feature (189)..(189): n is a, c, g, or t
  misc_feature (192)..(192): n is a, c, g, or t
  misc_feature (195)..(195): n is a, c, g, or t
  misc_feature (201)..(201): n is a, c, g, or t
  misc_feature (207)..(207): n is a, c, g, or t
  misc_feature (213)..(213): n is a, c, g, or t
  misc_feature (216)..(216): n is a, c, g, or t
  misc_feature (219)..(219): n is a, c, g, or t
  misc_feature (222)..(222): n is a, c, g, or t
  misc_feature (231)..(231): n is a, c, g, or t
  misc_feature (234)..(234): n is a, c, g, or t
  misc_feature (240)..(240): n is a, c, g, or t
  misc_feature (243)..(243): n is a, c, g, or t
  misc_feature (246)..(246): n is a, c, g, or t
  misc_feature (249)..(249): n is a, c, g, or t
  misc_feature (252)..(252): n is a, c, g, or t
  misc_feature (261)..(261): n is a, c, g, or t
  misc_feature (264)..(264): n is a, c, g, or t
  misc_feature (267)..(267): n is a, c, g, or t
  misc_feature (270)..(270): n is a, c, g, or t
  misc_feature (273)..(273): n is a, c, g, or t
  misc_feature (276)..(276): n is a, c, g, or t
  misc_feature (279)..(279): n is a, c, g, or t
  misc_feature (285)..(285): n is a, c, g, or t
  misc_feature (288)..(288): n is a, c, g, or t
  misc_feature (294)..(294): n is a, c, g, or t
  misc_feature (303)..(303): n is a, c, g, or t
  misc_feature (306)..(306): n is a, c, g, or t
  misc_feature (309)..(309): n is a, c, g, or t
  misc_feature (318)..(318): n is a, c, g, or t
  misc_feature (336)..(336): n is a, c, g, or t
  misc_feature (339)..(339): n is a, c, g, or t
  misc_feature (348)..(348): n is a, c, g, or t
  misc_feature (351)..(351): n is a, c, g, or t
  misc_feature (354)..(354): n is a, c, g, or t
  misc_feature (360)..(360): n is a, c, g, or t
  misc_feature (366)..(366): n is a, c, g, or t
  misc_feature (378)..(378): n is a, c, g, or t
  misc_feature (381)..(381): n is a, c, g, or t
wsngtngtngtnwsnggnacnytnaarwsnccngayggncargtngtnwsngaygcnaayathacnytnacngcnytnacngtnwsnccngaygcnytnwsnggnacnwsngcnwsngcngtnacnacnwsnacnggntaytayggnatgacnatggarccnggngartaygcngtnwsngtnacngtnmgnggnaarwsncargtntayggnmgngtnmgnathgayggnacngarwsnwsngtnacnytnaayatgytnytnmgnmgnwsnytngtngargtnwsnathwsngaygarytnytnacngayttymgncarathcaraayaaygtngcngaygayytnacnacnathmgngarytnaargargarwsngtnaaraayaay

SEQ ID NO: 790 - DNA, 399 bp, Artificial Sequence
  PfN-CNA84
  misc_feature (3)..(3): n is a, c, g, or t
  misc_feature (9)..(9): n is a, c, g, or t
  misc_feature (12)..(12): n is a, c, g, or t
  misc_feature (15)..(15): n is a, c, g, or t
  misc_feature (18)..(18): n is a, c, g, or t
  misc_feature (24)..(24): n is a, c, g, or t
  misc_feature (30)..(30): n is a, c, g, or t
  misc_feature (33)..(33): n is a, c, g, or t
  misc_feature (36)..(36): n is a, c, g, or t
  misc_feature (39)..(39): n is a, c, g, or t
  misc_feature (42)..(42): n is a, c, g, or t
  misc_feature (51)..(51): n is a, c, g, or t
  misc_feature (54)..(54): n is a, c, g, or t
  misc_feature (57)..(57): n is a, c, g, or t
  misc_feature (66)..(66): n is a, c, g, or t
  misc_feature (69)..(69): n is a, c, g, or t
  misc_feature (72)..(72): n is a, c, g, or t
  misc_feature (75)..(75): n is a, c, g, or t
  misc_feature (78)..(78): n is a, c, g, or t
  misc_feature (81)..(81): n is a, c, g, or t
  misc_feature (84)..(84): n is a, c, g, or t
  misc_feature (87)..(87): n is a, c, g, or t
  misc_feature (90)..(90): n is a, c, g, or t
  misc_feature (96)..(96): n is a, c, g, or t
  misc_feature (99)..(99): n is a, c, g, or t
  misc_feature (102)..(102): n is a, c, g, or t
  misc_feature (105)..(105): n is a, c, g, or t
  misc_feature (108)..(108): n is a, c, g, or t
  misc_feature (111)..(111): n is a, c, g, or t
  misc_feature (114)..(114): n is a, c, g, or t
  misc_feature (117)..(117): n is a, c, g, or t
  misc_feature (120)..(120): n is a, c, g, or t
  misc_feature (123)..(123): n is a, c, g, or t
  misc_feature (126)..(126): n is a, c, g, or t
  misc_feature (129)..(129): n is a, c, g, or t
  misc_feature (135)..(135): n is a, c, g, or t
  misc_feature (138)..(138): n is a, c, g, or t
  misc_feature (147)..(147): n is a, c, g, or t
  misc_feature (156)..(156): n is a, c, g, or t
  misc_feature (159)..(159): n is a, c, g, or t
  misc_feature (162)..(162): n is a, c, g, or t
  misc_feature (165)..(165): n is a, c, g, or t
  misc_feature (168)..(168): n is a, c, g, or t
  misc_feature (174)..(174): n is a, c, g, or t
  misc_feature (177)..(177): n is a, c, g, or t
  misc_feature (180)..(180): n is a, c, g, or t
  misc_feature (183)..(183): n is a, c, g, or t
  misc_feature (186)..(186): n is a, c, g, or t
  misc_feature (189)..(189): n is a, c, g, or t
  misc_feature (195)..(195): n is a, c, g, or t
  misc_feature (201)..(201): n is a, c, g, or t
  misc_feature (207)..(207): n is a, c, g, or t
  misc_feature (213)..(213): n is a, c, g, or t
  misc_feature (216)..(216): n is a, c, g, or t
  misc_feature (222)..(222): n is a, c, g, or t
  misc_feature (225)..(225): n is a, c, g, or t
  misc_feature (231)..(231): n is a, c, g, or t
  misc_feature (234)..(234): n is a, c, g, or t
  misc_feature (240)..(240): n is a, c, g, or t
  misc_feature (243)..(243): n is a, c, g, or t
  misc_feature (246)..(246): n is a, c, g, or t
  misc_feature (249)..(249): n is a, c, g, or t
  misc_feature (252)..(252): n is a, c, g, or t
  misc_feature (261)..(261): n is a, c, g, or t
  misc_feature (264)..(264): n is a, c, g, or t
  misc_feature (267)..(267): n is a, c, g, or t
  misc_feature (270)..(270): n is a, c, g, or t
  misc_feature (276)..(276): n is a, c, g, or t
  misc_feature (279)..(279): n is a, c, g, or t
  misc_feature (285)..(285): n is a, c, g, or t
  misc_feature (288)..(288): n is a, c, g, or t
  misc_feature (294)..(294): n is a, c, g, or t
  misc_feature (303)..(303): n is a, c, g, or t
  misc_feature (306)..(306): n is a, c, g, or t
  misc_feature (309)..(309): n is a, c, g, or t
  misc_feature (318)..(318): n is a, c, g, or t
  misc_feature (336)..(336): n is a, c, g, or t
  misc_feature (339)..(339): n is a, c, g, or t
  misc_feature (348)..(348): n is a, c, g, or t
  misc_feature (354)..(354): n is a, c, g, or t
  misc_feature (360)..(360): n is a, c, g, or t
  misc_feature (366)..(366): n is a, c, g, or t
  misc_feature (372)..(372): n is a, c, g, or t
  misc_feature (375)..(375): n is a, c, g, or t
  misc_feature (378)..(378): n is a, c, g, or t
  misc_feature (381)..(381): n is a, c, g, or t
  misc_feature (384)..(384): n is a, c, g, or t
  misc_feature (387)..(387): n is a, c, g, or t
  misc_feature (390)..(390): n is a, c, g, or t
  misc_feature (399)..(399): n is a, c, g, or t
wsnathytngtnwsnggnathytnaarwsnccngcnggngcnathathgcnggngcncarathacnytnacngcnytnacnacnwsnccngayytnytngcnggngtnwsngcnwsngcngtnacnwsngayacnggntaytayggnatgaaygtnytnccnggngtntaywsnytnacngtngcngtnaayggnaarwsncargtntayggnwsnttymgnytngayggnacngaracnacngtnacnytnaayatggtnytnmgnmgnaayytngtngargtnwsnathccngaygarytnytngtngayttymgncarathcaraayaaygtngcngaygayytngaracnathmgncarytngarytnmgngcnwsnggnwsngcngayaaygcn

SEQ ID NO: 791 - DNA, 390 bp, Artificial Sequence
  PfN-CNA85
  misc_feature (6)..(6): n is a, c, g, or t
  misc_feature (9)..(9): n is a, c, g, or t
  misc_feature (12)..(12): n is a, c, g, or t
  misc_feature (15)..(15): n is a, c, g, or t
  misc_feature (18)..(18): n is a, c, g, or t
  misc_feature (24)..(24): n is a, c, g, or t
  misc_feature (27)..(27): n is a, c, g, or t
  misc_feature (30)..(30): n is a, c, g, or t
  misc_feature (36)..(36): n is a, c, g, or t
  misc_feature (39)..(39): n is a, c, g, or t
  misc_feature (42)..(42): n is a, c, g, or t
  misc_feature (45)..(45): n is a, c, g, or t
  misc_feature (48)..(48): n is a, c, g, or t
  misc_feature (57)..(57): n is a, c, g, or t
  misc_feature (60)..(60): n is a, c, g, or t
  misc_feature (63)..(63): n is a, c, g, or t
  misc_feature (66)..(66): n is a, c, g, or t
  misc_feature (72)..(72): n is a, c, g, or t
  misc_feature (78)..(78): n is a, c, g, or t
  misc_feature (87)..(87): n is a, c, g, or t
  misc_feature (90)..(90): n is a, c, g, or t
  misc_feature (93)..(93): n is a, c, g, or t
  misc_feature (96)..(96): n is a, c, g, or t
  misc_feature (102)..(102): n is a, c, g, or t
  misc_feature (108)..(108): n is a, c, g, or t
  misc_feature (111)..(111): n is a, c, g, or t
  misc_feature (117)..(117): n is a, c, g, or t
  misc_feature (120)..(120): n is a, c, g, or t
  misc_feature (129)..(129): n is a, c, g, or t
  misc_feature (138)..(138): n is a, c, g, or t
  misc_feature (141)..(141): n is a, c, g, or t
  misc_feature (144)..(144): n is a, c, g, or t
  misc_feature (147)..(147): n is a, c, g, or t
  misc_feature (156)..(156): n is a, c, g, or t
  misc_feature (165)..(165): n is a, c, g, or t
  misc_feature (171)..(171): n is a, c, g, or t
  misc_feature (174)..(174): n is a, c, g, or t
  misc_feature (177)..(177): n is a, c, g, or t
  misc_feature (186)..(186): n is a, c, g, or t
  misc_feature (189)..(189): n is a, c, g, or t
  misc_feature (198)..(198): n is a, c, g, or t
  misc_feature (204)..(204): n is a, c, g, or t
  misc_feature (207)..(207): n is a, c, g, or t
  misc_feature (210)..(210): n is a, c, g, or t
  misc_feature (213)..(213): n is a, c, g, or t
  misc_feature (216)..(216): n is a, c, g, or t
  misc_feature (219)..(219): n is a, c, g, or t
  misc_feature (228)..(228): n is a, c, g, or t
  misc_feature (231)..(231): n is a, c, g, or t
  misc_feature (234)..(234): n is a, c, g, or t
  misc_feature (237)..(237): n is a, c, g, or t
  misc_feature (240)..(240): n is a, c, g, or t
  misc_feature (243)..(243): n is a, c, g, or t
  misc_feature (249)..(249): n is a, c, g, or t
  misc_feature (252)..(252): n is a, c, g, or t
  misc_feature (255)..(255): n is a, c, g, or t
  misc_feature (267)..(267): n is a, c, g, or t
  misc_feature (282)..(282): n is a, c, g, or t
  misc_feature (285)..(285): n is a, c, g, or t
  misc_feature (288)..(288): n is a, c, g, or t
  misc_feature (294)..(294): n is a, c, g, or t
  misc_feature (300)..(300): n is a, c, g, or t
  misc_feature (309)..(309): n is a, c, g, or t
  misc_feature (327)..(327): n is a, c, g, or t
  misc_feature (330)..(330): n is a, c, g, or t
  misc_feature (339)..(339): n is a, c, g, or t
  misc_feature (342)..(342): n is a, c, g, or t
  misc_feature (354)..(354): n is a, c, g, or t
  misc_feature (357)..(357): n is a, c, g, or t
  misc_feature (369)..(369): n is a, c, g, or t
  misc_feature (372)..(372): n is a, c, g, or t
  misc_feature (378)..(378): n is a, c, g, or t
  misc_feature (381)..(381): n is a, c, g, or t
  misc_feature (384)..(384): n is a, c, g, or t
  misc_feature (387)..(387): n is a, c, g, or t
  misc_feature (390)..(390): n is a, c, g, or t
athwsnggngtnytnytngayccnwsnggnaargcngtnwsnggngcncarathacnytnacngcnathgcnaaywsnatgcargtnytnmgnggnttyacntgywsngtnatgacngcngaraayggncartaywsngtnmgnytngargarggnaaytaywsnathwsngtngcncaycarggnmgnaayttygtntayggngcngtnacnytnacngargaywsngcnccnwsnwsnytnaaygcnytnytncaycarcargtnatggarcargargtnacnccngargtnathytntayttymgncarathcarcayaargtngcngaygaygtngtnathatgcarmgnytncarcaygaywsnwsncargcngcnmgngcngcn

SEQ ID NO: 792 - DNA, 399 bp, Artificial Sequence
  PfN-CNA86
  misc_feature (3)..(3): n is a, c, g, or t
  misc_feature (6)..(6): n is a, c, g, or t
  misc_feature (9)..(9): n is a, c, g, or t
  misc_feature (12)..(12): n is a, c, g, or t
  misc_feature (15)..(15): n is a, c, g, or t
  misc_feature (18)..(18): n is a, c, g, or t
  misc_feature (33)..(33): n is a, c, g, or t
  misc_feature (36)..(36): n is a, c, g, or t
  misc_feature (39)..(39): n is a, c, g, or t
  misc_feature (45)..(45): n is a, c, g, or t
  misc_feature (48)..(48): n is a, c, g, or t
  misc_feature (51)..(51): n is a, c, g, or t
  misc_feature (57)..(57): n is a, c, g, or t
  misc_feature (66)..(66): n is a, c, g, or t
  misc_feature (69)..(69): n is a, c, g, or t
  misc_feature (72)..(72): n is a, c, g, or t
  misc_feature (75)..(75): n is a, c, g, or t
  misc_feature (78)..(78): n is a, c, g, or t
  misc_feature (81)..(81): n is a, c, g, or t
  misc_feature (87)..(87): n is a, c, g, or t
  misc_feature (90)..(90): n is a, c, g, or t
  misc_feature (93)..(93): n is a, c, g, or t
  misc_feature (96)..(96): n is a, c, g, or t
  misc_feature (99)..(99): n is a, c, g, or t
  misc_feature (105)..(105): n is a, c, g, or t
  misc_feature (111)..(111): n is a, c, g, or t
  misc_feature (114)..(114): n is a, c, g, or t
  misc_feature (117)..(117): n is a, c, g, or t
  misc_feature (120)..(120): n is a, c, g, or t
  misc_feature (123)..(123): n is a, c, g, or t
  misc_feature (126)..(126): n is a, c, g, or t
  misc_feature (132)..(132): n is a, c, g, or t
  misc_feature (135)..(135): n is a, c, g, or t
  misc_feature (138)..(138): n is a, c, g, or t
  misc_feature (141)..(141): n is a, c, g, or t
  misc_feature (147)..(147): n is a, c, g, or t
  misc_feature (156)..(156): n is a, c, g, or t
  misc_feature (165)..(165): n is a, c, g, or t
  misc_feature (168)..(168): n is a, c, g, or t
  misc_feature (174)..(174): n is a, c, g, or t
  misc_feature (180)..(180): n is a, c, g, or t
  misc_feature (183)..(183): n is a, c, g, or t
  misc_feature (186)..(186): n is a, c, g, or t
  misc_feature (189)..(189): n is a, c, g, or t
  misc_feature (195)..(195): n is a, c, g, or t
  misc_feature (198)..(198): n is a, c, g, or t
  misc_feature (201)..(201): n is a, c, g, or t
  misc_feature (207)..(207): n is a, c, g, or t
  misc_feature (213)..(213): n is a, c, g, or t
  misc_feature (216)..(216): n is a, c, g, or t
  misc_feature (219)..(219): n is a, c, g, or t
  misc_feature (222)..(222): n is a, c, g, or t
  misc_feature (225)..(225): n is a, c, g, or t
  misc_feature (234)..(234): n is a, c, g, or t
  misc_feature (237)..(237): n is a, c, g, or t
  misc_feature (240)..(240): n is a, c, g, or t
  misc_feature (243)..(243): n is a, c, g, or t
  misc_feature (246)..(246): n is a, c, g, or t
  misc_feature (249)..(249): n is a, c, g, or t
  misc_feature (252)..(252): n is a, c, g, or t
  misc_feature (261)..(261): n is a, c, g, or t
  misc_feature (264)..(264): n is a, c, g, or t
  misc_feature (285)..(285): n is a, c, g, or t
  misc_feature (291)..(291): n is a, c, g, or t
  misc_feature (294)..(294): n is a, c, g, or t
  misc_feature (297)..(297): n is a, c, g, or t
  misc_feature (303)..(303): n is a, c, g, or t
  misc_feature (309)..(309): n is a, c, g, or t
  misc_feature (318)..(318): n is a, c, g, or t
  misc_feature (336)..(336): n is a, c, g, or t
  misc_feature (339)..(339): n is a, c, g, or t
  misc_feature (348)..(348): n is a, c, g, or t
  misc_feature (351)..(351): n is a, c, g, or t
  misc_feature (354)..(354): n is a, c, g, or t
  misc_feature (363)..(363): n is a, c, g, or t
  misc_feature (366)..(366): n is a, c, g, or t
  misc_feature (375)..(375): n is a, c, g, or t
  misc_feature (378)..(378): n is a, c, g, or t
  misc_feature (381)..(381): n is a, c, g, or t
  misc_feature (387)..(387): n is a, c, g, or t
  misc_feature (390)..(390): n is a, c, g, or t
  misc_feature (396)..(396): n is a, c, g, or t
  misc_feature (399)..(399): n is a, c, g, or t
wsngtnacngtnwsnggnathatgathaayccngtnggngarccngtngtnaaygcncarathacnytnacngcngtnacnaaywsnytnacngtnytnaaygcnttywsngcnacngtnmgnacngayggngtnggnacntaymgnathcarytngargarggnwsntaywsnathacngtngcngcnaayggnmgnwsnttygtntayggngcngtnacnytngayaayacnacnggnccnwsnacnytnaaycarytnytnaarcarcarathatggarwsngarytnacnccngaygtnathytntayttymgncarathcarcarcargtngcnaaygayytngcnacnathaargtnytngarathwsngcnacngaygcngcngarwsngcn

SEQ ID NO: 793 - DNA, 348 bp, Escherichia coli
ggcattagcgcgagcaaagcggaagcgagcgcggcgaacgcggataccagcgcggaagatgcgagcgaaagcgcgcgccaggcggcggaaagcgcggcgagcgcgaaaaaaagcgaagaagcgagcagcagcagcgcgagcgaagcggcgcagaaagcgagcgaaagcctgcagagcgcgaccgatgcggaactgagcaaaaaaaccgcggaaagcgcggcgggcaacgcggcgcgcgatgcgaccaccagcaccgaaaaagcgcgcgaaagcgcggaaagcgcgcagagcgcggaacagagccgcattgcggcggaagatgcggtgaaccgcattccgaccgtggtg

SEQ ID NO: 794 - DNA, 348 bp, Escherichia coli
ggcattagcgcgagcaaagcggaagcgagcgcggcgaacgcggataccagcgcggaagatgcgagcgaaagcgcgcgccaggcggcggaaagcgcggcgagcgcgaaaaaaagcgaagaagcgagcagcagcagcgcgagcgaagcggcgcagaaagcgagcgaaagcctgcagagcgcgaccgatgcggaactgagcaaaaaaaccgcggaaagcgcggcgggcaacgcggcgcgcgatgcgaccaccgcgaccgaaaaagcgcgcgaaagcgcggaaagcgcgcagagcgcggaacagagccgcattgcggcggaagatgcggtgaaccgcattccgaccgtggtg

SEQ ID NO: 795 - DNA, 348 bp, Escherichia coli
ggcattagcgcgagcaaagcggaagcgagcgcggcgaacgcggataccagcgcggaagatgcgagcgaaagcgcgcgccaggcggcggaaagcgcggcgagcgcgaaaaaaagcgaagaagcgagcagcagcagcgcgagcgaagcggcgcagaaagcgagcgaaagcctgcagagcgcgaccgatgcggaactgagcaaaaaaaccgcggaaagcgcggcgggcaacgcgagccgcgatgcgaccaccgcgaccgaaaaagcgcgcgaaagcgcggaaagcgcgcagagcgcggaacagagccgcattgcggcggaagaagcggtgaaccgcattccgaccgtggtg

SEQ ID NO: 796 - DNA, 348 bp, Escherichia coli
ggcattagcgcgagccaggcggaagaaagcgcggcgaacgcggataccagcgcgggcgaagcgagcgaaagcgcgcgccaggcggcggaaagcgcggcggcggcgaaaaaaagcgaagaagcgagcagcagcagcgcgagcgaagcggcgcagaaagcgagcgaaagcctgcagagcgcggcggatgcggaactgagcaaaaaaaccgcggaaagcgcggcgggcaacgcggcgcgcgatgcgaccaccgcggcggaaaaagcgcgcgaaagcgcggaaagcgcgcagagcgcggaacagagccgcattgcggcggaagatgcggtgaaccgcattccgaccgtggtg

SEQ ID NO: 797 - DNA, 348 bp, Escherichia coli
ggcattagcgcgagccaggcggaagaaagcgcggcgaacgcggataccagcgcgggcgatgcgagcgaaagcgcgcgccaggcggcggaaagcgcggcgagcgcgaaacagagcgaagaagcgagcagcagcagcgcgagcgcggcggcgcagaaagcgagcgaaagcctgcagagcgcgaccgatgcggaactgagcaaaaaaaccgcggaaagcgcggcgggcaacgcggtgcgcgatgcgaccaccgcgaccgaaaaagcgcgcgaaagcgcggaaagcgcgcagagcgcggaacagagccgcattgcggcggaagaagcggtgaaccgcattccgaccgtggtg

SEQ ID NO: 798 - DNA, 348 bp, Escherichia coli
ggcattagcgcgagccaggcggaagaaagcgcggcgaacgcggataccagcgcgggcgatgcgagcgaaagcgcgcgccaggcggcggaaagcgcggcgagcgcgaaacagagcgaagaagcgagcagcagcagcgcgagcgcggcggcgcagaaagcgagcgaaagcctgcagagcgcgaccgatgcggaactgagcaaaaaaaccgcggaaagcgcggcgggcaacgcggtgcgcgatgcgaccaccgcgaccgaaaaagcgcgcgaaagcaccgaaagcgcgcagagcgcggaacagagccgcattgcggcggaagaagcggtgaaccgcattccgaccgtggtg

SEQ ID NO: 799 - DNA, 348 bp, Escherichia coli
ggcattagcgcgagccaggcggaagaaagcgcggcgaacgcggataccagcgcgggcgatgcgagcgaaagcgcgcgccaggcggcggaaagcgcggcgagcgcgaaacagagcgaagaagcgagcagcagcagcgcgagcgcggcggcgcagaaagcgagcgaaagcctgcagagcgcgaccgatgcggaactgagcaaaaaaaccgcggaaagcgcggcgggcaacgcggcgcgcgatgcgaccaccgcgaccgaaaaagcgcgcgaaagcgcggaaagcgcgcagagcgcggaacagagccgcattgcggcggaagaagcggtgaaccgcattccgaccgtggtg

SEQ ID NO: 800 - DNA, 348 bp, Escherichia coli
ggcattagcgcgagccaggcggaagaaagcgcggcgaacgcggataccagcgcgggcgatgcgagcgaaagcgcgcgccaggcggcggaaagcgcggcgagcgcgaaacagagcgaagatgcgagcagcagcagcgcgagcgcggcggcgcagaaagcgagcgaaagcctgcagagcgcgaccgatgcggaactgagcaaaaaaatggcggaaagcgcggcgggcaacgcggcgcgcgatgcgaccaccgcgaccgaaaaagcgcgcgaaagcgcggaaagcgcgcagagcgcggaacagagccgcattgcggcggaagaagcggtgaaccgcattccgaccgtggtg

SEQ ID NO: 801 - DNA, 348 bp, Escherichia coli
ggcattagcgcgagccaggcggaagaaagcgcggcgaacgcggataccagcgcgggcgatgcgagcgaaagcgcgcgccaggcggcggaaagcgcggcggcggcgaaacagagcgaagaagcgagcagcagcagcgcgagcgcggcggcgcagaaagcgagcgaaagcctgcagagcgcgaccgatgcggaactgagcaaaaaaaccgcggaaagcgcggcgggcaacgcggcgcgcgatgcgaccaccgcggcggaaaaagcgcgcgaaagcgcggaaagcgcgcagagcgcggaacagagccgcattgcggcggaagaagcggtgaaccgcattccgaccgtggtg

SEQ ID NO: 802 - DNA, 348 bp, Escherichia coli
ggcattagcgcgagccaggcggaagaaaacgcggcgaacgcggataccagcgcgggcgatgcgagcgaaagcgcgcgccaggcggcggaaagcgcggcggcggcgaaacagagcgaagaagcgagcagcagcagcgcgagcgcggcggcgcagaaagcgagcgaaagcctgcagagcgcgaccgatgcggaactgagcaaaaaaaccgcggaaagcgcggcgggcaacgcggcgcgcgatgcgaccaccgcggcggaaaaagcgcgcgaaagcgcggaaagcgcgcagagcgcggaacagagccgcattgcggcggaagaagcggtgaaccgcattccgaccgtggtg

SEQ ID NO: 803 - DNA, 348 bp, Escherichia coli
ggcattagcgcgagccaggcggaagaaagcgcggcgaacgcggataccagcgcgggcgatgcgagcgaaagcgcgcgccaggcggcggaaagcgcggcggcggcgaaacagagcgaagaagcgagcagcagcagcgcgagcgcggcggcgcagaaagcgagcgaaagcctgcagagcgcgaccgatgcggaactgagcaaaaaaaccgcggaaagcgcggcgggcaacgcggcgcgcgatgcgaccaccgcgaccgaaaaagcgcgcgaaagcgcggaaagcgcgcagagcgcggaacagagccgcattgcggcggaagaagcggtgaaccgcattccgaccgtggtg

SEQ ID NO: 804 - DNA, 348 bp, Escherichia coli
ggcattagcgcgagccaggcggaagaaagcgcggcgaacgcggataccagcgcgggcgatgcgagcgaaagcgcgcgccaggcggcggaaagcgcggcggcggcgaaacagagcgaagaagcgagcagcagcagcgcgagcgcggcggcgcagaaagcgagcgaaagcctgcagagcgcggcggatgcggaactgagcaaaaaaaccgcggaaagcgcggcgggcaacgcggcgcgcgatgcgaccaccgcgaccgaaaaagcgcgcgaaagcgcggaaagcgcgcagagcgcggaacagagccgcattgcggcggaagaagcggtgaaccgcattccgaccgtggtg

SEQ ID NO: 805 - DNA, 348 bp, Escherichia coli
ggcattagcgcgagccaggcggaagaaagcgcggcgaacgcggataccagcgcgggcgatgcgagcgaaagcgcgcgccaggcggcggaaagcgcggcggcggcgaaacagagcgaagaagcgagcagcagcagcgcgagcgcggcggcgcagaaagcgagcgaaagcagccagagcgcggcggaagcggaactgagccgcaaaaccgcggaaagcgcggcgggcaacgcggcgcgcgatgcgaccaccgcgaccgaaaaagcgcgcgaaagcgcggaaagcgcgcagagcgcggaacagagccgcattgcggcggaagaagcggtgaaccgcattccgaccgtggtg

SEQ ID NO: 806 - DNA, 348 bp, Escherichia coli
ggcattagcgcgagccaggcggaagaaagcgcggcgcatgcggataccagcgcgggcgatgcgagcgaaagcgcgcgccaggcggcggaaagcgcggcggcggcgaaacagagcgaagaagcgagcagcagcagcgcgagcgcggcggcgcagaaagcgagcgaaagcagccagagcgcggcggaagcggaactgagccgcaaaaccgcggaaagcgcggcgggcaacgcggcgcgcgatgcgaccaccgcgaccgaaaaagcgcgcgaaagcgcggaaagcgcgcagagcgcggaacagagccgcattgcggcggaagaagcggtgaaccgcattccgaccgtggtg

SEQ ID NO: 807 - DNA, 348 bp, Escherichia coli
ggcattagcgcgagccaggcggaagaaagcgcggcgaacgcggataccagcgcgggcgatgcgagcgaaagcgcgcgccaggcggcggaaagcgcggcggcggcgaaacagagcgaagaagcgagcagcagcagcgcgagcgcggcggcgcagaaagcgagcgaaagcagccagagcgcggcggaagcggaactgagccgcaaaaccgcggaaagcgcggcgggcaacgcggcgcgcgatgcgaccaccgcgaccgaaaaagcgcgcgaaagcgcggaaagcgcgcagagcgcggaacagagccgcattgcggcggaagatgcggtgaaccgcattccgaccgtggtg

SEQ ID NO: 808 - DNA, 348 bp, Escherichia coli
ggcattagcgcgagccaggcggaagaaaacgcggcgaacgcggataccagcgcgggcgatgcgagcgaaagcgcgcgccaggcggcggaaagcgcggcggcggcgaaacagagcgaagaagcgagcagcagcagcgcgagcgcggcggcgcagaaagcgagcgaaagcagccagagcgcggcggaagcggaactgagccgcaaaaccgcggaaagcgcggcgggcaacgcgagccgcgatgcgaccaccgcggcggaaaaagcgcgcgaaagcgcggaaagcgcgcagagcgcggaacagagccgcattgcggcggaagaagcggtgaaccgcattccgaccgtggtg

SEQ ID NO: 809 - DNA, 348 bp, Escherichia coli
ggcattagcgcgagccaggcggaagaaaacgcggcgaacgcggataccagcgcgggcgatgcgagcgaaagcgcgcgccaggcggcggaaagcgcggcggcggcgaaacagagcgaagaagcgagcagcagcagcgcgagcgcggcggcgcagaaagcgagcgaaagcagccagagcgcggcggaagcggaactgagccgcaaaaccgcggaaagcgcggcgggcaacgcggtgcgcgatgcgaccaccgcgaccgaaaaagcgcgcgaaagcgcggaaagcgcgcagagcgcggaacagagccgcattgcggcggaagaagcggtgaaccgcattccgaccgtggtg

SEQ ID NO: 810 - DNA, 348 bp, Escherichia coli
ggcattagcgcgagccaggcggaagaaaacgcggcgaacgcggataccagcgcgggcgatgcgagcgaaagcgcgcgccaggcggcggaaagcgcggcggcggcgaaacagagcgaagaagcgagcagcagcagcgcgagcgcggcggcgcagaaagcgagcgaaagcagccagagcgcggcggaagcggaactgagccgcaaaaccgcggaaagcgcggcgggcaacgcggcgcgcgatgcgaccaccgcgaccgaaaaagcgcgcgaaagcgcggaaagcgcgcagagcgcggaacagagccgcattgcggcggaagaagcggtgaaccgcattccgaccgtggtg

SEQ ID NO: 811 - DNA, 348 bp, Escherichia coli
ggcattagcgcgagccaggcggaagaaagcgcggcgaacgcggataccagcgcgggcgaagcgagcgaaagcgcgcgccaggcggcggaaagcgcggcggcggcgaaacagagcgaagaagcgagcagcagcagcgcgagcgcggcggcgcagaaagcgagcgaaagcagccagagcgcggcggaagcggaactgagccgcaaaaccgcggaaagcgcggcgggcaacgcggcgcgcgatgcgaccaccgcgaccgaaaaagcgcgcgaaagcgcggaaagcgcgcagagcgcggaacagagccgcattgcggcggaagaagcggtgaaccgcattccgaccgtggtg

SEQ ID NO: 812 - DNA, 345 bp, Escherichia coli
ggcattagcgcgagccaggcggaagaaagcgcggcgaacgcggataccagcgcgggcgaagcgagcgaaagcgcgcgccaggcggcggaaagcgcggcggcggcgaaacagagcgaagaagcgagcagcagcagcgcgagcgcggcggcgcagaaagcgagcgaaagcagccagagcgcggcggaagcggaactgagccgcaaaaccgcggaaagcgcggcgggcaacgcggcgcgcgatgcgaccaccgcgaccgaaaaagcgcgcgaaagcgcggaaagcgcgcagagcgcggaacagagccgcattgcggcggaagcggtgaaccgcattccgaccgtggtg

SEQ ID NO: 813 - DNA, 348 bp, Escherichia coli
ggcattagcgcgagccaggcggaagaaggcgcggcgaacgcggataccagcgcgggcgaagcgagcgaaagcgcgcgccaggcggcggaaagcgcggcggcggcgaaacagagcgaagaagcgagcagcagcagcgcgagcgcggcggcgcagaaagcgagcgaaagcagccagagcgcggcggaagcggaactgagccgcaaaaccgcggaaagcgcggcgggcaacgcggcgcgcgatgcgaccaccgcgaccgaaaaagcgcgcgaaagcgcggaaagcgcgcagagcgcggaacagagccgcattgcggcggaagaagcggtgaaccgcattccgaccgtggtg

SEQ ID NO: 814 - DNA, 348 bp, Escherichia coli
ggcattagcagcagcaaagcggaagcgagcgcggcgaacgcggataccagcgcgggcgatgcgctggaaagcgcgcgccaggcggcggaaagcgcggcggcggcgaaacagagcgaagatgcgagcagcagcagcgcgagcgcggcggcgcagaaagcgagcgaaagcagccagagcgcggcggaagcggaactgagccgcaaaaccgcggaaagcgcggcgggcaacgcggcgcgcgatgcgaccaccgcgaccgaaaaagcgcgcgaaagcgcggaaagcgcgcagagcgcggaacagagccgcattgcggcggaagaagcggtgaaccgcattccgaccgtggtg

SEQ ID NO: 815 - DNA, 348 bp, Escherichia coli
ggcattagcagcagcaaagcggaagcgagcgcggcgaacgcggataccagcgcgggcgatgcgagcgaaagcgcgcgccaggcggcggaaagcgcggcggcggcgaaacagagcgaagaagcgagcagcagcagcgcgagcgcggcggcgcagaaagcgagcgaaagcagccagagcgcggcggaagcggaactgagccgcaaaaccgcggaaagcgcggcgggcaacgcggcgcgcgatgcgaccaccgcgaccgaaaaagcgcgcgaaagcgcggaaagcgcgcgcagcgcggaacagagccgcattgcggcggaagaagcggtgaaccgcattccgaccgtggtg

SEQ ID NO: 816 - DNA, 348 bp, Escherichia coli
ggcattagcgcgagcaaagcggaagcgagcgcggcgaacgcggataccagcgcggaagatgcgagcgaaagcgcgcgccaggcggcggaaagcgcggcggcggcgaaacagagcgaagaagcgagcagcagcagcgcgagcgcggcggcgcagaaagcgagcgaaagcctgcagagcgcggcggaagcggaactgagccgcaaaaccgcggaaagcgcggcgggcaacgcggcgcgcgatgcgaccaccgcgaccgaaaaagcgcgcgaaagcgcggaaagcgcgcagagcgcggaacagagccgcattgcggcggaagaagcggtgaaccgcattccgaccgtggtg

SEQ ID NO: 817 - DNA, 348 bp, Escherichia coli
ggcattagcgcgagcaaagcggaagcgagcgcggcgaacgcggataccagcgcgggcgaagcgagcgaaagcgcgcgccaggcgaccgaaagcgcggcgagcgcgaaacagagcgaagaagcgagcagcagcagcgcgagcgcggcggcgcagaaagcgagcgaaagcagccagagcgcggcggatgcggaactgagccgcaaaaccgcggaaagcgcggcgggcaacgcggcgcgcgatgcgaccaccgcgaccgaaaaagcgcgcgaaagcgcggaaagcgcgcagagcgcggaacagagccgcattgcggcggaagaagcggtgaaccgcattccgaccgtggtg

SEQ ID NO: 818 - DNA, 348 bp, Escherichia coli
ggcattagcgcgagccaggcggaagaaagcgcggcgaacgcggataccagcgcgggcgaagcgagcgaaagcgcgcgccaggcggcggaaagcgcggcgagcgcgaaacagagcgaagaagcgagcagcagcagcgcgagcgcggcggcgcagaaagcgagcgaaagcagccagagcgcggcggaagcggaactgagccgcaaaaccgcggaaagcgcggcgggcaacgcggcgcgcgatgcgaccaccgcgaccgaaaaagcgcgcgaaagcgcggaaagcgcgcagagcgcggaacagagccgcattgcggcggaagaagcggtgaaccgcattccgaccgtggtg

SEQ ID NO: 819 - DNA, 348 bp, Escherichia coli
ggcattagcgcgagccaggcggaagaaagcgcggcgaacgcggataccagcgcgggcgatgcgagcgaaagcgcgcgccaggcggtggaaagcgcggcgagcgcgaaacagagcgaagaagcgagcagcagcagcgcgagcgcggcggcgcagaaagcgagcgaaagcagccagagcgcggcggaagcggaactgagccgcaaaaccgcggaaagcgcggcgggcaacgcggcgcgcgatgcgaccaccgcgaccgaaaaagcgcgcgaaagcgcggaaagcgcgcagagcgcggaacagagccgcattgcggcggaagaagcggtgaaccgcattccgaccgtggtg

SEQ ID NO: 820 - DNA, 348 bp, Escherichia coli
ggcattagcgcgagccaggcggaagaaagcgcggcgaacgcggataccagcgcgggcgaagcgagcgaaagcgcgcgccaggcggcggaaagcgcggcgagcgcgaaacagagcgaagatgcgagcagcagcagcgcgagcgcggcggcgcagaaagcgagcgaaagcagccagagcgcggcggaagcggaactgagccgcaaaaccgcggaaagcgcggcgggcaacgcggcgcgcgatgcgaccaccgcgaccgaaaaagcgcgcgaaagcgcggaaagcgcgcagagcgcggaacagagccgcattgcggcggaagaagcggtgaaccgcattccgaccgtggtg

SEQ ID NO: 821 - DNA, 348 bp, Escherichia coli
ggcattagcgcgagccaggcggaagaaagcgcggcgaacgtggataccagcgcgggcgaagcgagcgaaagcgcgcgccaggcggcggaaagcgcggcgagcgcgaaacagagcgaagatgcgagcagcagcagcgcgagcgcggcggcgcagaaagcgagcgaaagcagccagagcgcggcggaagcggaactgagccgcaaaaccgcggaaagcgcggcgggcaacgcggcgcgcgatgcgaccaccgcgaccgaaaaagcgcgcgaaagcgcggaaagcgcgcagagcgcggaacagagccgcattgcggcggaagaagcggtgaaccgcattccgaccgtggtg

SEQ ID NO: 822 - DNA, 348 bp, Escherichia coli
ggcattagcgtgagccaggcggaagcgagcgcggcgaacgcggataccagcgcgggcgaagcgagcgaaagcgcgcgccaggcggcggaaagcgcggcgagcgcgaaaaaaagcgaagatgcgagcagcagcagcgcgagcgcggcggcgcagaaagcgagcgaaagcagccagagcgcggcggaagcggaactgagccgcaaaaccgcggaaagcgcggcgggcaacgcggcgcgcgatgcgaccaccgcgaccgaaaaagcgcgcgaaagcgcggaaagcgcgcagagcgcggaacagagccgcattgcggcggaagaagcggtgaaccgcattccgaccgtggtg

SEQ ID NO: 823 - DNA, 348 bp, Escherichia coli
ggcattagcgcgagccaggcggaagaaagcgcggcgaacgcggataccagcgcgggcgaagcgagcgaaagcgcgcgccaggcggcggaaagcgcggcgagcgcgaaacagagcgaagatgcgagcagcagcagcgcgagcgcggcggcgcagaaagcgagcgaaagcagccagagcgcggcggatgcggaactgagccgcaaaaccgcggaaagcgcggcgggcaacgcggcgcgcgatgcgaccaccgcggcggaaaaagcgcgcgaaagcgcggaaagcgcgcagagcgcggaacagagccgcattgcggcggaagatgcggtgaaccgcattccgaccgtggtg

SEQ ID NO: 824 - DNA, 348 bp, Escherichia coli
ggcattagcgcgagccaggcggaagaaagcgcggcgaacgcggataccagcgcgggcgaagcgagcgaaagcgcgcgccaggcggcggaaagcgcggcgagcgcgaaacagagcgaagatgcgagcagcagcagcgcgagcgcggcggcgcagaaagcgagcgaaagcagccagagcgcggcggaagcggaactgagccgcaaaaccgcggaaagcgcggcgggcaacgcggcgcgcgatgcgaccaccgcgaccgaaaaagcgcgcgaaagcgcggaaagcgcgcagagcgcggaacagagccgcattgcggcggaagatgcggtgaaccgcattccgaccgtggtg

SEQ ID NO: 825 - DNA, 348 bp, Escherichia coli
ggcattagcgcgagccaggcggaagaaagcgcggcgaacgcggataccagcgcgggcgaagcgagcgaaagcgcgcgccaggcggcggaaagcgcggcgagcgcgaaacagagcgaagatgcgagcagcagcagcgcgagcgcggcggcgcagaaagcgagcgaaagcagccagagcgcggcggatgcggaactgagcaaaaaaaccgcggaaagcgcggcgggcaacgcggcgcgcgatgcgaccaccgcgaccgaaaaagcgcgcgaaagcgcggaaagcgcgcagagcgcggaacagagccgcattgcggcggaagaagcggtgaaccgcattccgaccgtggtg

SEQ ID NO: 826 - DNA, 348 bp, Escherichia coli
ggcattagcgcgagccaggcggaagaaagcgcggcgaacgcggataccagcgcgggcgatgcgagcgaaagcgcgcgccaggcggcggaaagcgcggcgagcgcgaaacagagcgaagatgcgagcagcagcagcgcgagcgcggcggcgcagaaagcgagcgaaagcagccagagcgcggcggaagcggaactgagccgcaaaaccgcggaaagcgcggcgggcaacgcggcgcgcgatgcgaccaccgcgaccgaaaaagcgcgcgaaagcgcggaaagcgcgcagagcgcggaacagagccgcattgcggcggaagaagcggtgaaccgcattccgaccgtggtg

SEQ ID NO: 827 - DNA, 348 bp, Escherichia coli
ggcattagcgcgagccaggcggaagaaagcgcggcgaacgcggataccagcgcgggcgaagcgagcgaaagcgcgcgccaggcggcggaaagcgcggcggcggcgaaacagagcgaagatgcgagcagcagcagcgcgagcgcggcggcgcagaaagcgagcgaaagcagccagagcgcggcggaagcggaactgagcaaaaaaaccgcggaaagcgcggcgggcaacgcggcgcgcgatgcgaccaccgcgaccgaaaaagcgcgcgaaagcgcggaaagcgcgcagagcgcggaacagagccgcattgcggcggaagaagcggtgaaccgcattccgaccgtggtg

SEQ ID NO: 828 - DNA, 348 bp, Escherichia coli
ggcattagcgcgagccaggcggaagaaagcgcggcgaacgcggataccagcgcgggcgatgcgagcgaaagcgcgcgccaggcggcggaaagcgcggcggcggcgaaacagagcgaagatgcgagcagcagcagcgcgagcgcggcggcgcagaaagcgagcgaaagcagccagagcgcggcggaagcggaactgagccgcaaaaccgcggaaagcgcggcgggcaacgcggcgcgcgatgcgaccaccgcgaccgaaaaagcgcgcgaaagcgcggaaagcgcgcagagcgcggaacagagccgcattgcggcggaagaagcggtgaaccgcattccgaccgtggtg

SEQ ID NO: 829 - DNA, 348 bp, Escherichia coli
ggcattagcgcgagccaggcggaagaaagcgcggcgaacgcggataccagcgcgggcgatgcgctggaaagcgcgcgccaggcggcggaaagcgcggcggcggcgaaacagagcgaagatgcgagcagcagcagcgcgagcgcggcggcgcagaaagcgagcgaaagcagccagagcgcggcggaagcggaactgagccgcaaaaccgcggaaagcgcggcgggcaacgcggcgcgcgatgcgaccaccgcgaccgaaaaagcgcgcgaaagcgcggaaagcgcgcagagcgcggaacagagccgcattgcggcggaagaagcggtgaaccgcattccgaccgtggtg

SEQ ID NO: 830 - DNA, 348 bp, Escherichia coli
ggcattagcgcgagccaggcggaagaaagcgcggcgaacgcggataccagcgcgggcgatgcgctggaaagcgcgcgccaggcggcggaaagcgcggcggcggcgaaacagagcgaagaagcgagcagcagcagcgcgagcgcggcggcgcagaaagcgagcgaaagcagccagagcgcggcggaagcggaactgagccgcaaaaccgcggaaagcgcggcgggcaacgcggcgcgcgatgcgaccaccgcgaccgaaaaagcgcgcgaaagcgcggaaagcgcgcagagcgcggaacagagccgcattgcggcggaagaagcggtgaaccgcattccgaccgtggtg

SEQ ID NO: 831 - DNA, 348 bp, Escherichia coli
ggcattagcgcgagccaggcggaagaaagcgcggcgaacgcggataccagcgcgggcgatgcgagcgaaagcgcgcgccaggcggcggaaagcgcggcggcggcgaaacagagcgaagaagcgagcagcagcagcgcgagcgcggcggcgcagaaagcgagcgaaagcagccagagcgcggcggaagcggaactgagcaaaaaaaccgcggaaagcgcggcgggcaacgcggcgcgcgatgcgaccaccgcgaccgaaaaagcgcgcgaaagcgcggaaagcgcgcagagcgcggaacagagccgcattgcggcggaagaagcggtgaaccgcattccgaccgtggtg

SEQ ID NO: 832 - DNA, 348 bp, Escherichia coli
ggcattagcgcgagccaggcggaagaaagcgcggcgaacgcggataccagcgcgggcgatgcgagcgaaagcgcgcgccaggcggcggaaagcgcggcggcggcgaaacagagcgaagaagcgagcagcagcagcgcgagcgcggcggcgcagaaagcgagcgaaagcagccagagcgcggcggatgcggaactgagccgcaaaaccgcggaaagcgcggcgggcaacgcggcgcgcgatgcgaccaccgcgaccgaaaaagcgcgcgaaagcgcggaaagcgcgcagagcgcggaacagagccgcattgcggcggaagaagcggtgaaccgcattccgaccgtggtg

SEQ ID NO: 833 - DNA, 348 bp, Escherichia coli
ggcattagcgcgagccaggcggaagaaagcgcggcgaacgcggataccagcgcgggcgatgcgagcgaaagcgcgcgccaggcggcggaaagcgcggcggcggcgaaacagagcgaagaagcgagcagcagcagcgcgagcgcggcggcgcagaaagcgagcgaaagcagccagagcgcggcggatgcggaactgagcaaaaaaaccgcggaaagcgcggcgggcaacgcggcgcgcgatgcgaccaccgcgaccgaaaaagcgcgcgaaagcgcggaaagcgcgcagagcgcggaacagagccgcattgcggcggaagaagcggtgaaccgcattccgaccgtggtg

SEQ ID NO: 834 - DNA, 348 bp, Escherichia coli
ggcattagcgcgagccaggcggaagaaagcgcggcgaacgcggataccagcgcgggcgatgcgagcgaaagcgcgcgccaggcggcggaaagcgcggcggcggcgaaacagagcgaagaagcgagcagcagcagcgcgagcgcggcggcgcagaaagcgagcgaaagcagccagagcgcggcggatgcggaactgagcaaaaaaaccgcggaaagcgcggcgggcaacgcggcgcgcatgcagcgcccgcagcagaaaaaaccgggcagccagcagaaagcgcatagccagcgcgaacagagccgcattgcggcggaagaagcggtgaaccgcattccgaccgtggtg

SEQ ID NO: 835 - DNA, 327 bp, Escherichia coli
acccagagcaaagaaagcgcggcggcgagcgcgaaaagcgcgagcgatagcgcgaaaaccgcgaccagccgcgcggcggaagcgggccagaaagcgaccgatgcgaccgaagcggcgacccgcgcggtgaccgcggcgggcaacgcggaagaaagcagcacccgcgcgggcgaaagcgaaaaagcggcgggcgcggatgcggaaaaagcgcgccagcatgcggaaaaagcgcgcctggcgcaggaaagcgcgggcgaaattctgaaacgcgcggaagcggcgaccgtgagcgcggaagaagcgcgccgcatggcggaaaacgcgcgc

SEQ ID NO: 836 - DNA, 285 bp, Escherichia coli
agccagagcaaagaaagcgcggcggcgagcgcgaaaaccgcgagcgaaagcgcgaaagcggcgaccagcaaagcgaccgaaagcgcgcagaaagcgagcgaagcggcggaagcggcgacccgcgcgggcgaaagcgaaaaagcggcggcggcggatgcgaaagaagcgcgccagcatgcggaaaccgcgcgcgtggcgcaggaagcggcgggcgatgtgctgaaacgcgcggaagcggcgaccgtgagcgcggaagaagcgcgccgcatggcggaaaacgcgcgc

SEQ ID NO: 837 - DNA, 273 bp, Escherichia coli
accggcctgacccaggcgcgcgaaagcgcggaagcgagcgcgcgcagcgcgagcgaaagcgcggcgaccgcgaccgcgcgcgcggaagaaaccgaacagaaagcggaagaagcgaaagcgagcgcgaccaacgcggcggcgagcgcggaagaagcgcgccagcatgcggaaaacgcgcagagcgcgcaggcgaccgcggaagatgtgctggaacgcgcggaagcggcggtggtgagcgcggaagaagcgcgcagcatggcggaaaacgcgcgc

SEQ ID NO: 838 - DNA, 735 bp, Escherichia coli
gtgcgcaccgcggcggatgcgaaagcgagcgcggaaagcgcggcgcgcagcgaagcggatgcggcggatagcgaaaaaaaagcggaacagtttgcgcgcaacctgcaggatgcggtggcgaaagcgggcgatagcgcgagcgcggcggcgctgagcgcggcgggcgcgggcgaacaggcgaccgcggcgaaaagcgcggcgctggaagcggcggatagcaaagcggcgaccgaaaaagcggcgagcaacgcggcgctgagcgaaaaaaacgcggcggatagcgcgctggcggcgcgcaccagcgaaaacagcgcggcggatagcgcgaccaaagcggatgcgagcgaaaaagcggcggtgctgtatgaacagaccagcagcacccatgaaaccaacgcgggccagagcgcggcggatgcggcgctgagcgcgaccaaagcggcggatagcgcgctgaacgcgggcaaaagcgcgaccgaagcggcgggctatgcgaccgatgcgcagacccaggcgggcaacgcgaaacgcgcggcgaccgatgcgaccaccgcgaaagatgaaattgtgcgccagattagcggctttgatgaacatgtgagccagcaggaaaccgtgattaccgcgaaaggccagaccctggtggatcaggcgcgcaccgaagcgattaacgcgggccaggcggcgcagcatgcggcgcaggtgctggaagatgcgattaacgcgagcattaaa

SEQ ID NO: 839 - DNA, 348 bp, Artificial Sequence
  PCoil-CNA01
  misc_feature (3)..(3): n is a, c, g, or t
  misc_feature (9)..(9): n is a, c, g, or t
  misc_feature (12)..(12): n is a, c, g, or t
  misc_feature (15)..(15): n is a, c, g, or t
  misc_feature (21)..(21): n is a, c, g, or t
  misc_feature (27)..(27): n is a, c, g, or t
  misc_feature (30)..(30): n is a, c, g, or t
  misc_feature (33)..(33): n is a, c, g, or t
  misc_feature (36)..(36): n is a, c, g, or t
  misc_feature (42)..(42): n is a, c, g, or t
  misc_feature (48)..(48): n is a, c, g, or t
  misc_feature (51)..(51): n is a, c, g, or t
  misc_feature (54)..(54): n is a, c, g, or t
  misc_feature (63)..(63): n is a, c, g, or t
  misc_feature (66)..(66): n is a, c, g, or t
  misc_feature (72)..(72): n is a, c, g, or t
  misc_feature (75)..(75): n is a, c, g, or t
  misc_feature (78)..(78): n is a, c, g, or t
  misc_feature (84)..(84): n is a, c, g, or t
  misc_feature (87)..(87): n is a, c, g, or t
  misc_feature (93)..(93): n is a, c, g, or t
  misc_feature (96)..(96): n is a, c, g, or t
  misc_feature (99)..(99): n is a, c, g, or t
  misc_feature (102)..(102): n is a, c, g, or t
  misc_feature (105)..(105): n is a, c, g, or t
  misc_feature (114)..(114): n is a, c, g, or t
  misc_feature (123)..(123): n is a, c, g, or t
  misc_feature (126)..(126): n is a, c, g, or t
  misc_feature (129)..(129): n is a, c, g, or t
  misc_feature (132)..(132): n is a, c, g, or t
  misc_feature (135)..(135): n is a, c, g, or t
  misc_feature (138)..(138): n is a, c, g, or t
  misc_feature (141)..(141): n is a, c, g, or t
  misc_feature (147)..(147): n is a, c, g, or t
  misc_feature (150)..(150): n is a, c, g, or t
  misc_feature (159)..(159): n is a, c, g, or t
  misc_feature (162)..(162): n is a, c, g, or t
  misc_feature (168)..(168): n is a, c, g, or t
  misc_feature (171)..(171): n is a, c, g, or t
  misc_feature (177)..(177): n is a, c, g, or t
  misc_feature (180)..(180): n is a, c, g, or t
  misc_feature (183)..(183): n is a, c, g, or t
  misc_feature (189)..(189): n is a, c, g, or t
  misc_feature (195)..(195): n is a, c, g, or t
  misc_feature (198)..(198): n is a, c, g, or t
  misc_feature (207)..(207): n is a, c, g, or t
  misc_feature (210)..(210): n is a, c, g, or t
  misc_feature (216)..(216): n is a, c, g, or t
  misc_feature (219)..(219): n is a, c, g, or t
  misc_feature (222)..(222): n is a, c, g, or t
  misc_feature (225)..(225): n is a, c, g, or t
  misc_feature (231)..(231): n is a, c, g, or t
  misc_feature (234)..(234): n is a, c, g, or t
  misc_feature (237)..(237): n is a, c, g, or t
  misc_feature (243)..(243): n is a, c, g, or t
  misc_feature (246)..(246): n is a, c, g, or t
  misc_feature (249)..(249): n is a, c, g, or t
  misc_feature (252)..(252): n is a, c, g, or t
  misc_feature (255)..(255): n is a, c, g, or t
  misc_feature (264)..(264): n is a, c, g, or t
  misc_feature (267)..(267): n is a, c, g, or t
  misc_feature (273)..(273): n is a, c, g, or t
  misc_feature (276)..(276): n is a, c, g, or t
  misc_feature (282)..(282): n is a, c, g, or t
  misc_feature (285)..(285): n is a, c, g, or t
  misc_feature (291)..(291): n is a, c, g, or t
  misc_feature (294)..(294): n is a, c, g, or t
  misc_feature (303)..(303): n is a, c, g, or t
  misc_feature (306)..(306): n is a, c, g, or t
  misc_feature (312)..(312): n is a, c, g, or t
  misc_feature (315)..(315): n is a, c, g, or t
  misc_feature (324)..(324): n is a, c, g, or t
  misc_feature (327)..(327): n is a, c, g, or t
  misc_feature (333)..(333): n is a, c, g, or t
  misc_feature (339)..(339): n is a, c, g, or t
  misc_feature (342)..(342): n is a, c, g, or t
  misc_feature (345)..(345): n is a, c, g, or t
  misc_feature (348)..(348): n is a, c, g, or t
ggnathwsngcnwsnaargcngargcnwsngcngcnaaygcngayacnwsngcngargaygcnwsngarwsngcnmgncargcngcngarwsngcngcnwsngcnaaraarwsngargargcnwsnwsnwsnwsngcnwsngargcngcncaraargcnwsngarwsnytncarwsngcnacngaygcngarytnwsnaaraaracngcngarwsngcngcnggnaaygcngcnmgngaygcnacnacnwsnacngaraargcnmgngarwsngcngarwsngcncarwsngcngarcarwsnmgnathgcngcngargaygcngtnaaymgnathccnacngtngtn

SEQ ID NO: 840 - DNA, 348 bp, Artificial Sequence
  PCoil-CNA02
  misc_feature (3)..(3): n is a, c, g, or t
  misc_feature (9)..(9): n is a, c, g, or t
  misc_feature (12)..(12): n is a, c, g, or t
  misc_feature (15)..(15): n is a, c, g, or t
  misc_feature (21)..(21): n is a, c, g, or t
  misc_feature (27)..(27): n is a, c, g, or t
  misc_feature (30)..(30): n is a, c, g, or t
  misc_feature (33)..(33): n is a, c, g, or t
  misc_feature (36)..(36): n is a, c, g, or t
  misc_feature (42)..(42): n is a, c, g, or t
  misc_feature (48)..(48): n is a, c, g, or t
  misc_feature (51)..(51): n is a, c, g, or t
  misc_feature (54)..(54): n is a, c, g, or t
  misc_feature (63)..(63): n is a, c, g, or t
  misc_feature (66)..(66): n is a, c, g, or t
  misc_feature (72)..(72): n is a, c, g, or t
  misc_feature (75)..(75): n is a, c, g, or t
  misc_feature (78)..(78): n is a, c, g, or t
  misc_feature (84)..(84): n is a, c, g, or t
  misc_feature (87)..(87): n is a, c, g, or t
  misc_feature (93)..(93): n is a, c, g, or t
  misc_feature (96)..(96): n is a, c, g, or t
  misc_feature (99)..(99): n is a, c, g, or t
  misc_feature (102)..(102): n is a, c, g, or t
  misc_feature (105)..(105): n is a, c, g, or t
  misc_feature (114)..(114): n is a, c, g, or t
  misc_feature (123)..(123): n is a, c, g, or t
  misc_feature (126)..(126): n is a, c, g, or t
  misc_feature (129)..(129): n is a, c, g, or t
  misc_feature (132)..(132): n is a, c, g, or t
  misc_feature (135)..(135): n is a, c, g, or t
  misc_feature (138)..(138): n is a, c, g, or t
  misc_feature (141)..(141): n is a, c, g, or t
  misc_feature (147)..(147): n is a, c, g, or t
  misc_feature (150)..(150): n is a, c, g, or t
  misc_feature (159)..(159): n is a, c, g, or t
  misc_feature (162)..(162): n is a, c, g, or t
  misc_feature (168)..(168): n is a, c, g, or t
  misc_feature (171)..(171): n is a, c, g, or t
  misc_feature (177)..(177): n is a, c, g, or t
  misc_feature (180)..(180): n is a, c, g, or t
  misc_feature (183)..(183): n is a, c, g, or t
  misc_feature (189)..(189): n is a, c, g, or t
  misc_feature (195)..(195): n is a, c, g, or t
  misc_feature (198)..(198): n is a, c, g, or t
  misc_feature (207)..(207): n is a, c, g, or t
  misc_feature (210)..(210): n is a, c, g, or t
  misc_feature (216)..(216): n is a, c, g, or t
  misc_feature (219)..(219): n is a, c, g, or t
  misc_feature (222)..(222): n is a, c, g, or t
  misc_feature (225)..(225): n is a, c, g, or t
  misc_feature (231)..(231): n is a, c, g, or t
  misc_feature (234)..(234): n is a, c, g, or t
  misc_feature (237)..(237): n is a, c, g, or t
  misc_feature (243)..(243): n is a, c, g, or t
  misc_feature (246)..(246): n is a, c, g, or t
  misc_feature (249)..(249): n is a, c, g, or t
  misc_feature (252)..(252): n is a, c, g, or t
  misc_feature (255)..(255): n is a, c, g, or t
  misc_feature (264)..(264): n is a, c, g, or t
  misc_feature (267)..(267): n is a, c, g, or t
  misc_feature (273)..(273): n is a, c, g, or t
  misc_feature (276)..(276): n is a, c, g, or t
  misc_feature (282)..(282): n is a, c, g, or t
  misc_feature (285)..(285): n is a, c, g, or t
  misc_feature (291)..(291): n is a, c, g, or t
  misc_feature (294)..(294): n is a, c, g, or t
  misc_feature (303)..(303): n is a, c, g, or t
  misc_feature (306)..(306): n is a, c, g, or t
  misc_feature (312)..(312): n is a, c, g, or t
  misc_feature (315)..(315): n is a, c, g, or t
  misc_feature (324)..(324): n is a, c, g, or t
  misc_feature (327)..(327): n is a, c, g, or t
  misc_feature (333)..(333): n is a, c, g, or t
  misc_feature (339)..(339): n is a, c, g, or t
  misc_feature (342)..(342): n is a, c, g, or t
  misc_feature (345)..(345): n is a, c, g, or t
  misc_feature (348)..(348): n is a, c, g, or t
ggnathwsngcnwsnaargcngargcnwsngcngcnaaygcngayacnwsngcngargaygcnwsngarwsngcnmgncargcngcngarwsngcngcnwsngcnaaraarwsngargargcnwsnwsnwsnwsngcnwsngargcngcncaraargcnwsngarwsnytncarwsngcnacngaygcngarytnwsnaaraaracngcngarwsngcngcnggnaaygcngcnmgngaygcnacnacngcnacngaraargcnmgngarwsngcngarwsngcncarwsngcngarcarwsnmgnathgcngcngargaygcngtnaaymgnathccnacngtngtn

SEQ ID NO: 841 - DNA, 348 bp, Artificial Sequence
  PCoil-CNA03
  misc_feature (3)..(3): n is a, c, g, or t
  misc_feature (9)..(9): n is a, c, g, or t
  misc_feature (12)..(12): n is a, c, g, or t
  misc_feature (15)..(15): n is a, c, g, or t
  misc_feature (21)..(21): n is a, c, g, or t
  misc_feature (27)..(27): n is a, c, g, or t
  misc_feature (30)..(30): n is a, c, g, or t
  misc_feature (33)..(33): n is a, c, g, or t
  misc_feature (36)..(36): n is a, c, g, or t
  misc_feature (42)..(42): n is a, c, g, or t
  misc_feature (48)..(48): n is a, c, g, or t
  misc_feature (51)..(51): n is a, c, g, or t
  misc_feature (54)..(54): n is a, c, g, or t
  misc_feature (63)..(63): n is a, c, g, or t
  misc_feature (66)..(66): n is a, c, g, or t
  misc_feature (72)..(72): n is a, c, g, or t
  misc_feature (75)..(75): n is a, c, g, or t
  misc_feature (78)..(78): n is a, c, g, or t
  misc_feature (84)..(84): n is a, c, g, or t
  misc_feature (87)..(87): n is a, c, g, or t
  misc_feature (93)..(93): n is a, c, g, or t
  misc_feature (96)..(96): n is a, c, g, or t
  misc_feature (99)..(99): n is a, c, g, or t
  misc_feature (102)..(102): n is a, c, g, or t
  misc_feature (105)..(105): n is a, c, g, or t
  misc_feature (114)..(114): n is a, c, g, or t
  misc_feature (123)..(123): n is a, c, g, or t
  misc_feature (126)..(126): n is a, c, g, or t
  misc_feature (129)..(129): n is a, c, g, or t
  misc_feature (132)..(132): n is a, c, g, or t
  misc_feature (135)..(135): n is a, c, g, or t
  misc_feature (138)..(138): n is a, c, g, or t
  misc_feature (141)..(141): n is a, c, g, or t
  misc_feature (147)..(147): n is a, c, g, or t
  misc_feature (150)..(150): n is a, c, g, or t
  misc_feature (159)..(159): n is a, c, g, or t
  misc_feature (162)..(162): n is a, c, g, or t
  misc_feature (168)..(168): n is a, c, g, or t
  misc_feature (171)..(171): n is a, c, g, or t
  misc_feature (177)..(177): n is a, c, g, or t
  misc_feature (180)..(180): n is a, c, g, or t
  misc_feature (183)..(183): n is a, c, g, or t
  misc_feature (189)..(189): n is a, c, g, or t
  misc_feature (195)..(195): n is a, c, g, or t
  misc_feature (198)..(198): n is a, c, g, or t
  misc_feature (207)..(207): n is a, c, g, or t
  misc_feature (210)..(210): n is a, c, g, or t
  misc_feature (216)..(216): n is a, c, g, or t
  misc_feature (219)..(219): n is a, c, g, or t
  misc_feature (222)..(222): n is a, c, g, or t
  misc_feature (225)..(225): n is a, c, g, or t
  misc_feature (231)..(231): n is a, c, g, or t
  misc_feature (234)..(234): n is a, c, g, or t
  misc_feature (237)..(237): n is a, c, g, or t
  misc_feature (243)..(243): n is a, c, g, or t
  misc_feature (246)..(246): n is a, c, g, or t
  misc_feature (249)..(249): n is a, c, g, or t
  misc_feature (252)..(252): n is a, c, g, or t
  misc_feature (255)..(255): n is a, c, g, or t
  misc_feature (264)..(264): n is a, c, g, or t
  misc_feature (267)..(267): n is a, c, g, or t
  misc_feature (273)..(273): n is a, c, g, or t
  misc_feature (276)..(276): n is a, c, g, or t
  misc_feature (282)..(282): n is a, c, g, or t
  misc_feature (285)..(285): n is a, c, g, or t
  misc_feature (291)..(291): n is a, c, g, or t
  misc_feature (294)..(294): n is a, c, g, or t
  misc_feature (303)..(303): n is a, c, g, or t
  misc_feature (306)..(306): n is a, c, g, or t
  misc_feature (312)..(312): n is a, c, g, or t
  misc_feature (315)..(315): n is a, c, g, or t
  misc_feature (324)..(324): n is a, c, g, or t
  misc_feature (327)..(327): n is a, c, g, or t
  misc_feature (333)..(333): n is a, c, g, or t
  misc_feature (339)..(339): n is a, c, g, or t
  misc_feature (342)..(342): n is a, c, g, or t
  misc_feature (345)..(345): n is a, c, g, or t
  misc_feature (348)..(348): n is a, c, g, or t
ggnathwsngcnwsnaargcngargcnwsngcngcnaaygcngayacnwsngcngargaygcnwsngarwsngcnmgncargcngcngarwsngcngcnwsngcnaaraarwsngargargcnwsnwsnwsnwsngcnwsngargcngcncaraargcnwsngarwsnytncarwsngcnacngaygcngarytnwsnaaraaracngcngarwsngcngcnggnaaygcnwsnmgngaygcnacnacngcnacngaraargcnmgngarwsngcngarwsngcncarwsngcngarcarwsnmgnathgcngcngargargcngtnaaymgnathccnacngtngtn

SEQ ID NO: 842 - DNA, 348 bp, Artificial Sequence
  PCoil-CNA04
  misc_feature (3)..(3): n is a, c, g, or t
  misc_feature (9)..(9): n is a, c, g, or t
  misc_feature (12)..(12): n is a, c, g, or t
  misc_feature (15)..(15): n is a, c, g, or t
  misc_feature (21)..(21): n is a, c, g, or t
  misc_feature (30)..(30): n is a, c, g, or t
  misc_feature (33)..(33): n is a, c, g, or t
  misc_feature (36)..(36): n is a, c, g, or t
  misc_feature (42)..(42): n is a, c, g, or t
  misc_feature (48)..(48): n is a, c, g, or t
  misc_feature (51)..(51): n is a, c, g, or t
  misc_feature (54)..(54): n is a, c, g, or t
  misc_feature (57)..(57): n is a, c, g, or t
  misc_feature (63)..(63): n is a, c, g, or t
  misc_feature (66)..(66): n is a, c, g, or t
  misc_feature (72)..(72): n is a, c, g, or t
  misc_feature (75)..(75): n is a, c, g, or t
  misc_feature (78)..(78): n is a, c, g, or t
  misc_feature (84)..(84): n is a, c, g, or t
  misc_feature (87)..(87): n is a, c, g, or t
  misc_feature (93)..(93): n is a, c, g, or t
  misc_feature (96)..(96): n is a, c, g, or t
  misc_feature (99)..(99): n is a, c, g, or t
  misc_feature (102)..(102): n is a, c, g, or t
  misc_feature (105)..(105): n is a, c, g, or t
  misc_feature (114)..(114): n is a, c, g, or t
  misc_feature (123)..(123): n is a, c, g, or t
  misc_feature (126)..(126): n is a, c, g, or t
  misc_feature (129)..(129): n is a, c, g, or t
  misc_feature (132)..(132): n is a, c, g, or t
  misc_feature (135)..(135): n is a, c, g, or t
  misc_feature (138)..(138): n is a, c, g, or t
  misc_feature (141)..(141): n is a, c, g, or t
  misc_feature (147)..(147): n is a, c, g, or t
  misc_feature (150)..(150): n is a, c, g, or t
  misc_feature (159)..(159): n is a, c, g, or t
  misc_feature (162)..(162): n is a, c, g, or t
  misc_feature (168)..(168): n is a, c, g, or t
  misc_feature (171)..(171): n is a, c, g, or t
  misc_feature (177)..(177): n is a, c, g, or t
  misc_feature (180)..(180): n is a, c, g, or t
  misc_feature (183)..(183): n is a, c, g, or t
  misc_feature (189)..(189): n is a, c, g, or t
  misc_feature (195)..(195): n is a, c, g, or t
  misc_feature (198)..(198): n is a, c, g, or t
  misc_feature (207)..(207): n is a, c, g, or t
  misc_feature (210)..(210): n is a, c, g, or t
  misc_feature (216)..(216): n is a, c, g, or t
  misc_feature (219)..(219): n is a, c, g, or t
  misc_feature (222)..(222): n is a, c, g, or t
  misc_feature (225)..(225): n is a, c, g, or t
  misc_feature (231)..(231): n is a, c, g, or t
  misc_feature (234)..(234): n is a, c, g, or t
  misc_feature (237)..(237): n is a, c, g, or t
  misc_feature (243)..(243): n is a, c, g, or t
  misc_feature (246)..(246): n is a, c, g, or t
  misc_feature (249)..(249): n is a, c, g, or t
  misc_feature (252)..(252): n is a, c, g, or t
  misc_feature (255)..(255): n is a, c, g, or t
  misc_feature (264)..(264): n is a, c, g, or t
  misc_feature (267)..(267): n is a, c, g, or t
  misc_feature (273)..(273): n is a, c, g, or t
  misc_feature (276)..(276): n is a, c, g, or t
  misc_feature (282)..(282): n is a, c, g, or t
  misc_feature (285)..(285): n is a, c, g, or t
  misc_feature (291)..(291): n is a, c, g, or t
  misc_feature (294)..(294): n is a, c, g, or t
  misc_feature (303)..(303): n is a, c, g, or t
  misc_feature (306)..(306): n is a, c, g, or t
  misc_feature (312)..(312): n is a, c, g, or t
  misc_feature (315)..(315): n is a, c, g, or t
  misc_feature (324)..(324): n is a, c, g, or t
  misc_feature (327)..(327): n is a, c, g, or t
  misc_feature (333)..(333): n is a, c, g, or t
  misc_feature (339)..(339): n is a, c, g, or t
  misc_feature (342)..(342): n is a, c, g, or t
  misc_feature (345)..(345): n is a, c, g, or t
  misc_feature (348)..(348): n is a, c, g, or t
ggnathwsngcnwsncargcngargarwsngcngcnaaygcngayacnwsngcnggngargcnwsngarwsngcnmgncargcngcngarwsngcngcngcngcnaaraarwsngargargcnwsnwsnwsnwsngcnwsngargcngcncaraargcnwsngarwsnytncarwsngcngcngaygcngarytnwsnaaraaracngcngarwsngcngcnggnaaygcngcnmgngaygcnacnacngcngcngaraargcnmgngarwsngcngarwsngcncarwsngcngarcarwsnmgnathgcngcngargaygcngtnaaymgnathccnacngtngtn

SEQ ID NO: 843 - DNA, 348 bp, Artificial Sequence
  PCoil-CNA05
  misc_feature (3)..(3): n is a, c, g, or t
  misc_feature (9)..(9): n is a, c, g, or t
  misc_feature (12)..(12): n is a, c, g, or t
  misc_feature (15)..(15): n is a, c, g, or t
  misc_feature (21)..(21): n is a, c, g, or t
  misc_feature (30)..(30): n is a, c, g, or t
  misc_feature (33)..(33): n is a, c, g, or t
  misc_feature (36)..(36): n is a, c, g, or t
  misc_feature (42)..(42): n is a, c, g, or t
  misc_feature (48)..(48): n is a, c, g, or t
  misc_feature (51)..(51): n is a, c, g, or t
  misc_feature (54)..(54): n is a, c, g, or t
  misc_feature (57)..(57): n is a, c, g, or t
  misc_feature (63)..(63): n is a, c, g, or t
  misc_feature (66)..(66): n is a, c, g, or t
  misc_feature (72)..(72): n is a, c, g, or t
  misc_feature (75)..(75): n is a, c, g, or t
  misc_feature (78)..(78): n is a, c, g, or t
  misc_feature (84)..(84): n is a, c, g, or t
  misc_feature (87)..(87): n is a, c, g, or t
  misc_feature (93)..(93): n is a, c, g, or t
  misc_feature (96)..(96): n is a, c, g, or t
  misc_feature (99)..(99): n is a, c, g, or t
  misc_feature (102)..(102): n is a, c, g, or t
  misc_feature (105)..(105): n is a, c, g, or t
  misc_feature (114)..(114): n is a, c, g, or t
  misc_feature (123)..(123): n is a, c, g, or t
  misc_feature (126)..(126): n is a, c, g, or t
  misc_feature (129)..(129): n is a, c, g, or t
  misc_feature (132)..(132): n is a, c, g, or t
  misc_feature (135)..(135): n is a, c, g, or t
  misc_feature (138)..(138): n is a, c, g, or t
  misc_feature (141)..(141): n is a, c, g, or t
  misc_feature (144)..(144): n is a, c, g, or t
  misc_feature (147)..(147): n is a, c, g, or t
  misc_feature (150)..(150): n is a, c, g, or t
  misc_feature (159)..(159): n is a, c, g, or t
  misc_feature (162)..(162): n is a, c, g, or t
  misc_feature (168)..(168): n is a, c, g, or t
  misc_feature (171)..(171): n is a, c, g, or t
  misc_feature (177)..(177): n is a, c, g, or t
  misc_feature (180)..(180): n is a, c, g, or t
  misc_feature (183)..(183): n is a, c, g, or t
  misc_feature (189)..(189): n is a, c, g, or t
  misc_feature (195)..(195): n is a, c, g, or t
  misc_feature (198)..(198): n is a, c, g, or t
  misc_feature (207)..(207): n is a, c, g, or t
  misc_feature (210)..(210): n is a, c, g, or t
  misc_feature (216)..(216): n is a, c, g, or t
  misc_feature (219)..(219): n is a, c, g, or t
  misc_feature (222)..(222): n is a, c, g, or t
  misc_feature (225)..(225): n is a, c, g, or t
  misc_feature (231)..(231): n is a, c, g, or t
  misc_feature (234)..(234): n is a, c, g, or t
  misc_feature (237)..(237): n is a, c, g, or t
  misc_feature (243)..(243): n is a, c, g, or t
  misc_feature (246)..(246): n is a, c, g, or t
  misc_feature (249)..(249): n is a, c, g, or t
  misc_feature (252)..(252): n is a, c, g, or t
  misc_feature (255)..(255): n is a, c, g, or t
  misc_feature (264)..(264): n is a, c, g, or t
  misc_feature (267)..(267): n is a, c, g, or t
  misc_feature (273)..(273): n is a, c, g, or t
  misc_feature (276)..(276): n is a, c, g, or t
  misc_feature (282)..(282): n is a, c, g, or t
  misc_feature (285)..(285): n is a, c, g, or t
  misc_feature (291)..(291): n is a, c, g, or t
  misc_feature (294)..(294): n is a, c, g, or t
  misc_feature (303)..(303): n is a, c, g, or t
  misc_feature (306)..(306): n is a, c, g, or t
  misc_feature (312)..(312): n is a, c, g, or t
  misc_feature (315)..(315): n is a, c, g, or t
  misc_feature (324)..(324): n is a, c, g, or t
  misc_feature (327)..(327): n is a, c, g, or t
  misc_feature (333)..(333): n is a, c, g, or t
  misc_feature (339)..(339): n is a, c, g, or t
  misc_feature (342)..(342): n is a, c, g, or t
  misc_feature (345)..(345): n is a, c, g, or t
  misc_feature (348)..(348): n is a, c, g, or t
ggnathwsngcnwsncargcngargarwsngcngcnaaygcngayacnwsngcnggngaygcnwsngarwsngcnmgncargcngcngarwsngcngcnwsngcnaarcarwsngargargcnwsnwsnwsnwsngcnwsngcngcngcncaraargcnwsngarwsnytncarwsngcnacngaygcngarytnwsnaaraaracngcngarwsngcngcnggnaaygcngtnmgngaygcnacnacngcnacngaraargcnmgngarwsngcngarwsngcncarwsngcngarcarwsnmgnathgcngcngargargcngtnaaymgnathccnacngtngtn

SEQ ID NO: 844 - DNA, 348 bp, Artificial Sequence
  PCoil-CNA06
  misc_feature (3)..(3): n is a, c, g, or t
  misc_feature (9)..(9): n is a, c, g, or t
  misc_feature (12)..(12): n is a, c, g, or t
  misc_feature (15)..(15): n is a, c, g, or t
  misc_feature (21)..(21): n is a, c, g, or t
  misc_feature (30)..(30): n is a, c, g, or t
  misc_feature (33)..(33): n is a, c, g, or t
  misc_feature (36)..(36): n is a, c, g, or t
  misc_feature (42)..(42): n is a, c, g, or t
  misc_feature (48)..(48): n is a, c, g, or t
  misc_feature (51)..(51): n is a, c, g, or t
  misc_feature (54)..(54): n is a, c, g, or t
  misc_feature (57)..(57): n is a, c, g, or t
  misc_feature (63)..(63): n is a, c, g, or t
  misc_feature (66)..(66): n is a, c, g, or t
  misc_feature (72)..(72): n is a, c, g, or t
  misc_feature (75)..(75): n is a, c, g, or t
  misc_feature (78)..(78): n is a, c, g, or t
  misc_feature (84)..(84): n is a, c, g, or t
  misc_feature (87)..(87): n is a, c, g, or t
  misc_feature (93)..(93): n is a, c, g, or t
  misc_feature (96)..(96): n is a, c, g, or t
  misc_feature (99)..(99): n is a, c, g, or t
  misc_feature (102)..(102): n is a, c, g, or t
  misc_feature (105)..(105): n is a, c, g, or t
  misc_feature (114)..(114): n is a, c, g, or t
  misc_feature (123)..(123): n is a, c, g, or t
  misc_feature (126)..(126): n is a, c, g, or t
  misc_feature (129)..(129): n is a, c, g, or t
  misc_feature (132)..(132): n is a, c, g, or t
  misc_feature (135)..(135): n is a, c, g, or t
  misc_feature (138)..(138): n is a, c, g, or t
  misc_feature (141)..(141): n is a, c, g, or t
  misc_feature (144)..(144): n is a, c, g, or t
  misc_feature (147)..(147): n is a, c, g, or t
  misc_feature (150)..(150): n is a, c, g, or t
  misc_feature (159)..(159): n is a, c, g, or t
  misc_feature (162)..(162): n is a, c, g, or t
  misc_feature (168)..(168): n is a, c, g, or t
  misc_feature (171)..(171): n is a, c, g, or t
  misc_feature (177)..(177): n is a, c, g, or t
  misc_feature (180)..(180): n is a, c, g, or t
  misc_feature (183)..(183): n is a, c, g, or t
  misc_feature (189)..(189): n is a, c, g, or t
  misc_feature (195)..(195): n is a, c, g, or t
  misc_feature (198)..(198): n is a, c, g, or t
  misc_feature (207)..(207): n is a, c, g, or t
  misc_feature (210)..(210): n is a, c, g, or t
  misc_feature (216)..(216): n is a, c, g, or t
  misc_feature (219)..(219): n is a, c, g, or t
  misc_feature (222)..(222): n is a, c, g, or t
  misc_feature (225)..(225): n is a, c, g, or t
  misc_feature (231)..(231): n is a, c, g, or t
  misc_feature (234)..(234): n is a, c, g, or t
  misc_feature (237)..(237): n is a, c, g, or t
  misc_feature (243)..(243): n is a, c, g, or t
  misc_feature (246)..(246): n is a, c, g, or t
  misc_feature (249)..(249): n is a, c, g, or t
  misc_feature (252)..(252): n is a, c, g, or t
  misc_feature (255)..(255): n is a, c, g, or t
  misc_feature (264)..(264): n is a, c, g, or t
  misc_feature (267)..(267): n is a, c, g, or t
  misc_feature (273)..(273): n is a, c, g, or t
  misc_feature (276)..(276): n is a, c, g, or t
  misc_feature (282)..(282): n is a, c, g, or t
  misc_feature (285)..(285): n is a, c, g, or t
  misc_feature (291)..(291): n is a, c, g, or t
  misc_feature (294)..(294): n is a, c, g, or t
  misc_feature (303)..(303): n is a, c, g, or t
  misc_feature (306)..(306): n is a, c, g, or t
  misc_feature (312)..(312): n is a, c, g, or t
  misc_feature (315)..(315): n is a, c, g, or t
  misc_feature (324)..(324): n is a, c, g, or t
  misc_feature (327)..(327): n is a, c, g, or t
  misc_feature (333)..(333): n is a, c, g, or t
  misc_feature (339)..(339): n is a, c, g, or t
  misc_feature (342)..(342): n is a, c, g, or t
  misc_feature (345)..(345): n is a, c, g, or t
  misc_feature (348)..(348): n is a, c, g, or t
ggnathwsngcnwsncargcngargarwsngcngcnaaygcngayacnwsngcnggngaygcnwsngarwsngcnmgncargcngcngarwsngcngcnwsngcnaarcarwsngargargcnwsnwsnwsnwsngcnwsngcngcngcncaraargcnwsngarwsnytncarwsngcnacngaygcngarytnwsnaaraaracngcngarwsngcngcnggnaaygcngtnmgngaygcnacnacngcnacngaraargcnmgngarwsnacngarwsngcncarwsngcngarcarwsnmgnathgcngcngargargcngtnaaymgnathccnacngtngtn

SEQ ID NO: 845 - DNA, 348 bp, Artificial Sequence
  PCoil-CNA07
  misc_feature (3)..(3): n is a, c, g, or t
  misc_feature (9)..(9): n is a, c, g, or t
  misc_feature (12)..(12): n is a, c, g, or t
  misc_feature (15)..(15): n is a, c, g, or t
  misc_feature (21)..(21): n is a, c, g, or t
  misc_feature (30)..(30): n is a, c, g, or t
  misc_feature (33)..(33): n is a, c, g, or t
  misc_feature (36)..(36): n is a, c, g, or t
  misc_feature (42)..(42): n is a, c, g, or t
  misc_feature (48)..(48): n is a, c, g, or t
  misc_feature (51)..(51): n is a, c, g, or t
  misc_feature (54)..(54): n is a, c, g, or t
  misc_feature (57)..(57): n is a, c, g, or t
  misc_feature (63)..(63): n is a, c, g, or t
  misc_feature (66)..(66): n is a, c, g, or t
  misc_feature (72)..(72): n is a, c, g, or t
  misc_feature (75)..(75): n is a, c, g, or t
  misc_feature (78)..(78): n is a, c, g, or t
  misc_feature (84)..(84): n is a, c, g, or t
  misc_feature (87)..(87): n is a, c, g, or t
  misc_feature (93)..(93): n is a, c, g, or t
  misc_feature (96)..(96): n is a, c, g, or t
  misc_feature (99)..(99): n is a, c, g, or t
  misc_feature (102)..(102): n is a, c, g, or t
  misc_feature (105)..(105): n is a, c, g, or t
  misc_feature (114)..(114): n is a, c, g, or t
  misc_feature (123)..(123): n is a, c, g, or t
  misc_feature (126)..(126): n is a, c, g, or t
  misc_feature (129)..(129): n is a, c, g, or t
  misc_feature (132)..(132): n is a, c, g, or t
  misc_feature (135)..(135): n is a, c, g, or t
  misc_feature (138)..(138): n is a, c, g, or t
  misc_feature (141)..(141): n is a, c, g, or t
  misc_feature (144)..(144): n is a, c, g, or t
  misc_feature (147)..(147): n is a, c, g, or t
  misc_feature (150)..(150): n is a, c, g, or t
  misc_feature (159)..(159): n is a, c, g, or t
  misc_feature (162)..(162): n is a, c, g, or t
  misc_feature (168)..(168): n is a, c, g, or t
  misc_feature (171)..(171): n is a, c, g, or t
  misc_feature (177)..(177): n is a, c, g, or t
  misc_feature (180)..(180): n is a, c, g, or t
  misc_feature (183)..(183): n is a, c, g, or t
  misc_feature (189)..(189): n is a, c, g, or t
  misc_feature (195)..(195): n is a, c, g, or t
  misc_feature (198)..(198): n is a, c, g, or t
  misc_feature (207)..(207): n is a, c, g, or t
  misc_feature (210)..(210): n is a, c, g, or t
  misc_feature (216)..(216): n is a, c, g, or t
  misc_feature (219)..(219): n is a, c, g, or t
  misc_feature (222)..(222): n is a, c, g, or t
  misc_feature (225)..(225): n is a, c, g, or t
  misc_feature (231)..(231): n is a, c, g, or t
  misc_feature (234)..(234): n is a, c, g, or t
  misc_feature (237)..(237): n is a, c, g, or t
  misc_feature (243)..(243): n is a, c, g, or t
  misc_feature (246)..(246): n is a, c, g, or t
  misc_feature (249)..(249): n is a, c, g, or t
  misc_feature (252)..(252): n is a, c, g, or t
  misc_feature (255)..(255): n is a, c, g, or t
  misc_feature (264)..(264): n is a, c, g, or t
  misc_feature (267)..(267): n is a, c, g, or t
  misc_feature (273)..(273): n is a, c, g, or t
  misc_feature (276)..(276): n is a, c, g, or t
  misc_feature (282)..(282): n is a, c, g, or t
  misc_feature (285)..(285): n is a, c, g, or t
  misc_feature (291)..(291): n is a, c, g, or t
  misc_feature (294)..(294): n is a, c, g, or t
  misc_feature (303)..(303): n is a, c, g, or t
  misc_feature (306)..(306): n is a, c, g, or t
  misc_feature (312)..(312): n is a, c, g, or t
  misc_feature (315)..(315): n is a, c, g, or t
  misc_feature (324)..(324): n is a, c, g, or t
  misc_feature (327)..(327): n is a, c, g, or t
  misc_feature (333)..(333): n is a, c, g, or t
  misc_feature (339)..(339): n is a, c, g, or t
  misc_feature (342)..(342): n is a, c, g, or t
  misc_feature (345)..(345): n is a, c, g, or t
  misc_feature (348)..(348): n is a, c, g, or t
ggnathwsngcnwsncargcngargarwsngcngcnaaygcngayacnwsngcnggngaygcnwsngarwsngcnmgncargcngcngarwsngcngcnwsngcnaarcarwsngargargcnwsnwsnwsnwsngcnwsngcngcngcncaraargcnwsngarwsnytncarwsngcnacngaygcngarytnwsnaaraaracngcngarwsngcngcnggnaaygcngcnmgngaygcnacnacngcnacngaraargcnmgngarwsngcngarwsngcncarwsngcngarcarwsnmgnathgcngcngargargcngtnaaymgnathccnacngtngtn

SEQ ID NO: 846 - DNA, 348 bp, Artificial Sequence
  PCoil-CNA08
  misc_feature (3)..(3): n is a, c, g, or t
  misc_feature (9)..(9): n is a, c, g, or t
  misc_feature (12)..(12): n is a, c, g, or t
  misc_feature (15)..(15): n is a, c, g, or t
  misc_feature (21)..(21): n is a, c, g, or t
  misc_feature (30)..(30): n is a, c, g, or t
  misc_feature (33)..(33): n is a, c, g, or t
  misc_feature (36)..(36): n is a, c, g, or t
  misc_feature (42)..(42): n is a, c, g, or t
  misc_feature (48)..(48): n is a, c, g, or t
  misc_feature (51)..(51): n is a, c, g, or t
  misc_feature (54)..(54): n is a, c, g, or t
  misc_feature (57)..(57): n is a, c, g, or t
  misc_feature (63)..(63): n is a, c, g, or t
  misc_feature (66)..(66): n is a, c, g, or t
  misc_feature (72)..(72): n is a, c, g, or t
  misc_feature (75)..(75): n is a, c, g, or t
  misc_feature (78)..(78): n is a, c, g, or t
  misc_feature (84)..(84): n is a, c, g, or t
  misc_feature (87)..(87): n is a, c, g, or t
  misc_feature (93)..(93): n is a, c, g, or t
  misc_feature (96)..(96): n is a, c, g, or t
  misc_feature (99)..(99): n is a, c, g, or t
  misc_feature (102)..(102): n is a, c, g, or t
  misc_feature (105)..(105): n is a, c, g, or t
  misc_feature (114)..(114): n is a, c, g, or t
  misc_feature (123)..(123): n is a, c, g, or t
  misc_feature (126)..(126): n is a, c, g, or t
  misc_feature (129)..(129): n is a, c, g, or t
  misc_feature (132)..(132): n is a, c, g, or t
  misc_feature (135)..(135): n is a, c, g, or t
  misc_feature (138)..(138): n is a, c, g, or t
  misc_feature (141)..(141): n is a, c, g, or t
  misc_feature (144)..(144): n is a, c, g, or t
  misc_feature (147)..(147): n is a, c, g, or t
  misc_feature (150)..(150): n is a, c, g, or t
  misc_feature (159)..(159): n is a, c, g, or t
  misc_feature (162)..(162): n is a, c, g, or t
  misc_feature (168)..(168): n is a, c, g, or t
  misc_feature (171)..(171): n is a, c, g, or t
  misc_feature (177)..(177): n is a, c, g, or t
  misc_feature (180)..(180): n is a, c, g, or t
  misc_feature (183)..(183): n is a, c, g, or t
  misc_feature (189)..(189): n is a, c, g, or t
  misc_feature (195)..(195): n is a, c, g, or t
  misc_feature (198)..(198): n is a, c, g, or t
  misc_feature (210)..(210): n is a, c, g, or t
  misc_feature (216)..(216): n is a, c, g, or t
  misc_feature (219)..(219): n is a, c, g, or t
  misc_feature (222)..(222): n is a, c, g, or t
  misc_feature (225)..(225): n is a, c, g, or t
  misc_feature (231)..(231): n is a, c, g, or t
  misc_feature (234)..(234): n is a, c, g, or t
  misc_feature (237)..(237): n is a, c, g, or t
  misc_feature (243)..(243): n is a, c, g, or t
  misc_feature (246)..(246): n is a, c, g, or t
  misc_feature (249)..(249): n is a, c, g, or t
  misc_feature (252)..(252): n is a, c, g, or t
  misc_feature (255)..(255): n is a, c, g, or t
  misc_feature (264)..(264): n is a, c, g, or t
  misc_feature (267)..(267): n is a, c, g, or t
  misc_feature (273)..(273): n is a, c, g, or t
  misc_feature (276)..(276): n is a, c, g, or t
  misc_feature (282)..(282): n is a, c, g, or t
  misc_feature (285)..(285): n is a, c, g, or t
  misc_feature (291)..(291): n is a, c, g, or t
  misc_feature (294)..(294): n is a, c, g, or t
  misc_feature (303)..(303): n is a, c, g, or t
  misc_feature (306)..(306): n is a, c, g, or t
  misc_feature (312)..(312): n is a, c, g, or t
  misc_feature (315)..(315): n is a, c, g, or t
  misc_feature (324)..(324): n is a, c, g, or t
  misc_feature (327)..(327): n is a, c, g, or t
  misc_feature (333)..(333): n is a, c, g, or t
  misc_feature (339)..(339): n is a, c, g, or t
  misc_feature (342)..(342): n is a, c, g, or t
  misc_feature (345)..(345): n is a, c, g, or t
  misc_feature (348)..(348): n is a, c, g, or t
ggnathwsngcnwsncargcngargarwsngcngcnaaygcngayacnwsngcnggngaygcnwsngarwsngcnmgncargcngcngarwsngcngcnwsngcnaarcarwsngargaygcnwsnwsnwsnwsngcnwsngcngcngcncaraargcnwsngarwsnytncarwsngcnacngaygcngarytnwsnaaraaratggcngarwsngcngcnggnaaygcngcnmgngaygcnacnacngcnacngaraargcnmgngarwsngcngarwsngcncarwsngcngarcarwsnmgnathgcngcngargargcngtnaaymgnathccnacngtngtn

SEQ ID NO: 847 - DNA, 348 bp, Artificial Sequence
  PCoil-CNA09
  misc_feature (3)..(3): n is a, c, g, or t
  misc_feature (9)..(9): n is a, c, g, or t
  misc_feature (12)..(12): n is a, c, g, or t
  misc_feature (15)..(15): n is a, c, g, or t
  misc_feature (21)..(21): n is a, c, g, or t
  misc_feature (30)..(30): n is a, c, g, or t
  misc_feature (33)..(33): n is a, c, g, or t
  misc_feature (36)..(36): n is a, c, g, or t
  misc_feature (42)..(42): n is a, c, g, or t
  misc_feature (48)..(48): n is a, c, g, or t
  misc_feature (51)..(51): n is a, c, g, or t
  misc_feature (54)..(54): n is a, c, g, or t
  misc_feature (57)..(57): n is a, c, g, or t
  misc_feature (63)..(63): n is a, c, g, or t
  misc_feature (66)..(66): n is a, c, g, or t
  misc_feature (72)..(72): n is a, c, g, or t
  misc_feature (75)..(75): n is a, c, g, or t
  misc_feature (78)..(78): n is a, c, g, or t
  misc_feature (84)..(84): n is a, c, g, or t
  misc_feature (87)..(87): n is a, c, g, or t
  misc_feature (93)..(93): n is a, c, g, or t
  misc_feature (96)..(96): n is a, c, g, or t
  misc_feature (99)..(99): n is a, c, g, or t
  misc_feature (102)..(102): n is a, c, g, or t
  misc_feature (105)..(105): n is a, c, g, or t
  misc_feature (114)..(114): n is a, c, g, or t
  misc_feature (123)..(123): n is a, c, g, or t
  misc_feature (126)..(126): n is a, c, g, or t
  misc_feature (129)..(129): n is a, c, g, or t
  misc_feature (132)..(132): n is a, c, g, or t
  misc_feature (135)..(135): n is a, c, g, or t
  misc_feature (138)..(138): n is a, c, g, or t
  misc_feature (141)..(141): n is a, c, g, or t
  misc_feature (144)..(144): n is a, c, g, or t
  misc_feature (147)..(147): n is a, c, g, or t
  misc_feature (150)..(150): n is a, c, g, or t
  misc_feature (159)..(159): n is a, c, g, or t
  misc_feature (162)..(162): n is a, c, g, or t
  misc_feature (168)..(168): n is a, c, g, or t
  misc_feature (171)..(171): n is a, c, g, or t
  misc_feature (177)..(177): n is a, c, g, or t
  misc_feature (180)..(180): n is a, c, g, or t
  misc_feature (183)..(183): n is a, c, g, or t
  misc_feature (189)..(189): n is a, c, g, or t
  misc_feature (195)..(195): n is a, c, g, or t
  misc_feature (198)..(198): n is a, c, g, or t
  misc_feature (207)..(207): n is a, c, g, or t
  misc_feature (210)..(210): n is a, c, g, or t
  misc_feature (216)..(216): n is a, c, g, or t
  misc_feature (219)..(219): n is a, c, g, or t
  misc_feature (222)..(222): n is a, c, g, or t
  misc_feature (225)..(225): n is a, c, g, or t
  misc_feature (231)..(231): n is a, c, g, or t
  misc_feature (234)..(234): n is a, c, g, or t
  misc_feature (237)..(237): n is a, c, g, or t
  misc_feature (243)..(243): n is a, c, g, or t
  misc_feature (246)..(246): n is a, c, g, or t
  misc_feature (249)..(249): n is a, c, g, or t
  misc_feature (252)..(252): n is a, c, g, or t
  misc_feature (255)..(255): n is a, c, g, or t
  misc_feature (264)..(264): n is a, c, g, or t
  misc_feature (267)..(267): n is a, c, g, or t
  misc_feature (273)..(273): n is a, c, g, or t
  misc_feature (276)..(276): n is a, c, g, or t
  misc_feature (282)..(282): n is a, c, g, or t
  misc_feature (285)..(285): n is a, c, g, or t
  misc_feature (291)..(291): n is a, c, g, or t
  misc_feature (294)..(294): n is a, c, g, or t
  misc_feature (303)..(303): n is a, c, g, or t
  misc_feature (306)..(306): n is a, c, g, or t
  misc_feature (312)..(312): n is a, c, g, or t
  misc_feature (315)..(315): n is a, c, g, or t
  misc_feature (324)..(324): n is a, c, g, or t
  misc_feature (327)..(327): n is a, c, g, or t
  misc_feature (333)..(333): n is a, c, g, or t
  misc_feature (339)..(339): n is a, c, g, or t
  misc_feature (342)..(342): n is a, c, g, or t
  misc_feature (345)..(345): n is a, c, g, or t
  misc_feature (348)..(348): n is a, c, g, or t
ggnathwsngcnwsncargcngargarwsngcngcnaaygcngayacnwsngcnggngaygcnwsngarwsngcnmgncargcngcngarwsngcngcngcngcnaarcarwsngargargcnwsnwsnwsnwsngcnwsngcngcngcncaraargcnwsngarwsnytncarwsngcnacngaygcngarytnwsnaaraaracngcngarwsngcngcnggnaaygcngcnmgngaygcnacnacngcngcngaraargcnmgngarwsngcngarwsngcncarwsngcngarcarwsnmgnathgcngcngargargcngtnaaymgnathccnacngtngtn

SEQ ID NO: 848 - DNA, 348 bp, Artificial Sequence
  PCoil-CNA10
  misc_feature (3)..(3): n is a, c, g, or t
  misc_feature (9)..(9): n is a, c, g, or t
  misc_feature (12)..(12): n is a, c, g, or t
  misc_feature (15)..(15): n is a, c, g, or t
  misc_feature (21)..(21): n is a, c, g, or t
  misc_feature (33)..(33): n is a, c, g, or t
  misc_feature (36)..(36): n is a, c, g, or t
  misc_feature (42)..(42): n is a, c, g, or t
  misc_feature (48)..(48): n is a, c, g, or t
  misc_feature (51)..(51): n is a, c, g, or t
  misc_feature (54)..(54): n is a, c, g, or t
  misc_feature (57)..(57): n is a, c, g, or t
  misc_feature (63)..(63): n is a, c, g, or t
  misc_feature (66)..(66): n is a, c, g, or t
  misc_feature (72)..(72): n is a, c, g, or t
  misc_feature (75)..(75): n is a, c, g, or t
  misc_feature (78)..(78): n is a, c, g, or t
  misc_feature (84)..(84): n is a, c, g, or t
  misc_feature (87)..(87): n is a, c, g, or t
  misc_feature (93)..(93): n is a, c, g, or t
  misc_feature (96)..(96): n is a, c, g, or t
  misc_feature (99)..(99): n is a, c, g, or t
  misc_feature (102)..(102): n is a, c, g, or t
  misc_feature (105)..(105): n is a, c, g, or t
  misc_feature (114)..(114): n is a, c, g, or t
  misc_feature (123)..(123): n is a, c, g, or t
  misc_feature (126)..(126): n is a, c, g, or t
  misc_feature (129)..(129): n is a, c, g, or t
  misc_feature (132)..(132): n is a, c, g, or t
  misc_feature (135)..(135): n is a, c, g, or t
  misc_feature (138)..(138): n is a, c, g, or t
  misc_feature (141)..(141): n is a, c, g, or t
  misc_feature (144)..(144): n is a, c, g, or t
  misc_feature (147)..(147): n is a, c, g, or t
  misc_feature (150)..(150): n is a, c, g, or t
  misc_feature (159)..(159): n is a, c, g, or t
  misc_feature (162)..(162): n is a, c, g, or t
  misc_feature (168)..(168): n is a, c, g, or t
  misc_feature (171)..(171): n is a, c, g, or t
  misc_feature (177)..(177): n is a, c, g, or t
  misc_feature (180)..(180): n is a, c, g, or t
  misc_feature (183)..(183): n is a, c, g, or t
  misc_feature (189)..(189): n is a, c, g, or t
  misc_feature (195)..(195): n is a, c, g, or t
  misc_feature (198)..(198): n is a, c, g, or t
  misc_feature (207)..(207): n is a, c, g, or t
  misc_feature (210)..(210): n is a, c, g, or t
  misc_feature (216)..(216): n is a, c, g, or t
  misc_feature (219)..(219): n is a, c, g, or t
  misc_feature (222)..(222): n is a, c, g, or t
  misc_feature (225)..(225): n is a, c, g, or t
  misc_feature (231)..(231): n is a, c, g, or t
  misc_feature (234)..(234): n is a, c, g, or t
  misc_feature (237)..(237): n is a, c, g, or t
  misc_feature (243)..(243): n is a, c, g, or t
  misc_feature (246)..(246): n is a, c, g, or t
  misc_feature (249)..(249): n is a, c, g, or t
  misc_feature (252)..(252): n is a, c, g, or t
  misc_feature (255)..(255): n is a, c, g, or t
  misc_feature (264)..(264): n is a, c, g, or t
  misc_feature (267)..(267): n is a, c, g, or t
  misc_feature (273)..(273): n is a, c, g, or t
  misc_feature (276)..(276): n is a, c, g, or t
  misc_feature (282)..(282): n is a, c, g, or t
  misc_feature (285)..(285): n is a, c, g, or t
  misc_feature (291)..(291): n is a, c, g, or t
  misc_feature (294)..(294): n is a, c, g, or t
  misc_feature (303)..(303): n is a, c, g, or t
  misc_feature (306)..(306): n is a, c, g, or t
  misc_feature (312)..(312): n is a, c, g, or t
  misc_feature (315)..(315): n is a, c, g, or t
  misc_feature (324)..(324): n is a, c, g, or t
  misc_feature (327)..(327): n is a, c, g, or t
  misc_feature (333)..(333): n is a, c, g, or t
  misc_feature (339)..(339): n is a, c, g, or t
  misc_feature (342)..(342): n is a, c, g, or t
  misc_feature (345)..(345): n is a, c, g, or t
  misc_feature (348)..(348): n is a, c, g, or t
ggnathwsngcnwsncargcngargaraaygcngcnaaygcngayacnwsngcnggngaygcnwsngarwsngcnmgncargcngcngarwsngcngcngcngcnaarcarwsngargargcnwsnwsnwsnwsngcnwsngcngcngcncaraargcnwsngarwsnytncarwsngcnacngaygcngarytnwsnaaraaracngcngarwsngcngcnggnaaygcngcnmgngaygcnacnacngcngcngaraargcnmgngarwsngcngarwsngcncarwsngcngarcarwsnmgnathgcngcngargargcngtnaaymgnathccnacngtngtn

SEQ ID NO: 849 - DNA, 348 bp, Artificial Sequence
  PCoil-CNA11
  misc_feature (3)..(3): n is a, c, g, or t
  misc_feature (9)..(9): n is a, c, g, or t
  misc_feature (12)..(12): n is a, c, g, or t
  misc_feature (15)..(15): n is a, c, g, or t
  misc_feature (21)..(21): n is a, c, g, or t
  misc_feature (30)..(30): n is a, c, g, or t
  misc_feature (33)..(33): n is a, c, g, or t
  misc_feature (36)..(36): n is a, c, g, or t
  misc_feature (42)..(42): n is a, c, g, or t
  misc_feature (48)..(48): n is a, c, g, or t
  misc_feature (51)..(51): n is a, c, g, or t
  misc_feature (54)..(54): n is a, c, g, or t
  misc_feature (57)..(57): n is a, c, g, or t
  misc_feature (63)..(63): n is a, c, g, or t
  misc_feature (66)..(66): n is a, c, g, or t
  misc_feature (72)..(72): n is a, c, g, or t
  misc_feature (75)..(75): n is a, c, g, or t
  misc_feature (78)..(78): n is a, c, g, or t
  misc_feature (84)..(84): n is a, c, g, or t
  misc_feature (87)..(87): n is a, c, g, or t
  misc_feature (93)..(93): n is a, c, g, or t
  misc_feature (96)..(96): n is a, c, g, or t
  misc_feature (99)..(99): n is a, c, g, or t
  misc_feature (102)..(102): n is a, c, g, or t
  misc_feature (105)..(105): n is a, c, g, or t
  misc_feature (114)..(114): n is a, c, g, or t
  misc_feature (123)..(123): n is a, c, g, or t
  misc_feature (126)..(126): n is a, c, g, or t
  misc_feature (129)..(129): n is a, c, g, or t
  misc_feature (132)..(132): n is a, c, g, or t
  misc_feature (135)..(135): n is a, c, g, or t
  misc_feature (138)..(138): n is a, c, g, or t
  misc_feature (141)..(141): n is a, c, g, or t
  misc_feature (144)..(144): n is a, c, g, or t
  misc_feature (147)..(147): n is a, c, g, or t
  misc_feature (150)..(150): n is a, c, g, or t
  misc_feature (159)..(159): n is a, c, g, or t
  misc_feature (162)..(162): n is a, c, g, or t
  misc_feature (168)..(168): n is a, c, g, or t
  misc_feature (171)..(171): n is a, c, g, or t
  misc_feature (177)..(177): n is a, c, g, or t
  misc_feature (180)..(180): n is a, c, g, or t
  misc_feature (183)..(183): n is a, c, g, or t
  misc_feature (189)..(189): n is a, c, g, or t
  misc_feature (195)..(195): n is a, c, g, or t
  misc_feature (198)..(198): n is a, c, g, or t
  misc_feature (207)..(207): n is a, c, g, or t
  misc_feature (210)..(210): n is a, c, g, or t
  misc_feature (216)..(216): n is a, c, g, or t
  misc_feature (219)..(219): n is a, c, g, or t
  misc_feature (222)..(222): n is a, c, g, or t
  misc_feature (225)..(225): n is a, c, g, or t
  misc_feature (231)..(231): n is a, c, g, or t
  misc_feature (234)..(234): n is a, c, g, or t
  misc_feature (237)..(237): n is a, c, g, or t
  misc_feature (243)..(243): n is a, c, g, or t
  misc_feature (246)..(246): n is a, c, g, or t
  misc_feature (249)..(249): n is a, c, g, or t
  misc_feature (252)..(252): n is a, c, g, or t
  misc_feature (255)..(255): n is a, c, g, or t
  misc_feature (264)..(264): n is a, c, g, or t
  misc_feature (267)..(267): n is a, c, g, or t
  misc_feature (273)..(273): n is a, c, g, or t
  misc_feature (276)..(276): n is a, c, g, or t
  misc_feature (282)..(282): n is a, c, g, or t
  misc_feature (285)..(285): n is a, c, g, or t
  misc_feature (291)..(291): n is a, c, g, or t
  misc_feature (294)..(294): n is a, c, g, or t
  misc_feature (303)..(303): n is a, c, g, or t
  misc_feature (306)..(306): n is a, c, g, or t
  misc_feature (312)..(312): n is a, c, g, or t
  misc_feature (315)..(315): n is a, c, g, or t
  misc_feature (324)..(324): n is a, c, g, or t
  misc_feature (327)..(327): n is a, c, g, or t
  misc_feature (333)..(333): n is a, c, g, or t
  misc_feature (339)..(339): n is a, c, g, or t
  misc_feature (342)..(342): n is a, c, g, or t
  misc_feature (345)..(345): n is a, c, g, or t
  misc_feature (348)..(348): n is a, c, g, or t
ggnathwsngcnwsncargcngargarwsngcngcnaaygcngayacnwsngcnggngaygcnwsngarwsngcnmgncargcngcngarwsngcngcngcngcnaarcarwsngargargcnwsnwsnwsnwsngcnwsngcngcngcncaraargcnwsngarwsnytncarwsngcnacngaygcngarytnwsnaaraaracngcngarwsngcngcnggnaaygcngcnmgngaygcnacnacngcnacngaraargcnmgngarwsngcngarwsngcncarwsngcngarcarwsnmgnathgcngcngargargcngtnaaymgnathccnacngtngtn

SEQ ID NO: 850 - DNA, 348 bp, Artificial Sequence
  PCoil-CNA12
  misc_feature (3)..(3): n is a, c, g, or t
  misc_feature (9)..(9): n is a, c, g, or t
  misc_feature (12)..(12): n is a, c, g, or t
  misc_feature (15)..(15): n is a, c, g, or t
  misc_feature (21)..(21): n is a, c, g, or t
  misc_feature (30)..(30): n is a, c, g, or t
  misc_feature (33)..(33): n is a, c, g, or t
  misc_feature (36)..(36): n is a, c, g, or t
  misc_feature (42)..(42): n is a, c, g, or t
  misc_feature (48)..(48): n is a, c, g, or t
  misc_feature (51)..(51): n is a, c, g, or t
  misc_feature (54)..(54): n is a, c, g, or t
  misc_feature (57)..(57): n is a, c, g, or t
  misc_feature (63)..(63): n is a, c, g, or t
  misc_feature (66)..(66): n is a, c, g, or t
  misc_feature (72)..(72): n is a, c, g, or t
  misc_feature (75)..(75): n is a, c, g, or t
  misc_feature (78)..(78): n is a, c, g, or t
  misc_feature (84)..(84): n is a, c, g, or t
  misc_feature (87)..(87): n is a, c, g, or t
  misc_feature (93)..(93): n is a, c, g, or t
  misc_feature (96)..(96): n is a, c, g, or t
  misc_feature (99)..(99): n is a, c, g, or t
  misc_feature (102)..(102): n is a, c, g, or t
  misc_feature (105)..(105): n is a, c, g, or t
  misc_feature (114)..(114): n is a, c, g, or t
  misc_feature (123)..(123): n is a, c, g, or t
  misc_feature (126)..(126): n is a, c, g, or t
  misc_feature (129)..(129): n is a, c, g, or t
  misc_feature (132)..(132): n is a, c, g, or t
  misc_feature (135)..(135): n is a, c, g, or t
  misc_feature (138)..(138): n is a, c, g, or t
  misc_feature (141)..(141): n is a, c, g, or t
  misc_feature (144)..(144): n is a, c, g, or t
  misc_feature (147)..(147): n is a, c, g, or t
  misc_feature (150)..(150): n is a, c, g, or t
  misc_feature (159)..(159): n is a, c, g, or t
  misc_feature (162)..(162): n is a, c, g, or t
  misc_feature (168)..(168): n is a, c, g, or t
  misc_feature (171)..(171): n is a, c, g, or t
  misc_feature (177)..(177): n is a, c, g, or t
  misc_feature (180)..(180): n is a, c, g, or t
  misc_feature (183)..(183): n is a, c, g, or t
  misc_feature (189)..(189): n is a, c, g, or t
  misc_feature (195)..(195): n is a, c, g, or t
  misc_feature (198)..(198): n is a, c, g, or t
  misc_feature (207)..(207): n is a, c, g, or t
  misc_feature (210)..(210): n is a, c, g, or t
  misc_feature (216)..(216): n is a, c, g, or t
  misc_feature (219)..(219): n is a, c, g, or t
  misc_feature (222)..(222): n is a, c, g, or t
  misc_feature (225)..(225): n is a, c, g, or t
  misc_feature (231)..(231): n is a, c, g, or t
  misc_feature (234)..(234): n is a, c, g, or t
  misc_feature (237)..(237): n is a, c, g, or t
  misc_feature (243)..(243): n is a, c, g, or t
  misc_feature (246)..(246): n is a, c, g, or t
  misc_feature (249)..(249): n is a, c, g, or t
  misc_feature (252)..(252): n is a, c, g, or t
  misc_feature (255)..(255): n is a, c, g, or t
  misc_feature (264)..(264): n is a, c, g, or t
  misc_feature (267)..(267): n is a, c, g, or t
  misc_feature (273)..(273): n is a, c, g, or t
  misc_feature (276)..(276): n is a, c, g, or t
  misc_feature (282)..(282): n is a, c, g, or t
  misc_feature (285)..(285): n is a, c, g, or t
  misc_feature (291)..(291): n is a, c, g, or t
  misc_feature (294)..(294): n is a, c, g, or t
  misc_feature (303)..(303): n is a, c, g, or t
  misc_feature (306)..(306): n is a, c, g, or t
  misc_feature (312)..(312): n is a, c, g, or t
  misc_feature (315)..(315): n is a, c, g, or t
  misc_feature (324)..(324): n is a, c, g, or t
  misc_feature (327)..(327): n is a, c, g, or t
  misc_feature (333)..(333): n is a, c, g, or t
  misc_feature (339)..(339): n is a, c, g, or t
  misc_feature (342)..(342): n is a, c, g, or t
  misc_feature (345)..(345): n is a, c, g, or t
  misc_feature (348)..(348): n is a, c, g, or t
ggnathwsngcnwsncargcngargarwsngcngcnaaygcngayacnwsngcnggngaygcnwsngarwsngcnmgncargcngcngarwsngcngcngcngcnaarcarwsngargargcnwsnwsnwsnwsngcnwsngcngcngcncaraargcnwsngarwsnytncarwsngcngcngaygcngarytnwsnaaraaracngcngarwsngcngcnggnaaygcngcnmgngaygcnacnacngcnacngaraargcnmgngarwsngcngarwsngcncarwsngcngarcarwsnmgnathgcngcngargargcngtnaaymgnathccnacngtngtn

SEQ ID NO: 851 - DNA, 348 bp, Artificial Sequence
  PCoil-CNA13
  misc_feature (3)..(3): n is a, c, g, or t
  misc_feature (9)..(9): n is a, c, g, or t
  misc_feature (12)..(12): n is a, c, g, or t
  misc_feature (15)..(15): n is a, c, g, or t
  misc_feature (21)..(21): n is a, c, g, or t
  misc_feature (30)..(30): n is a, c, g, or t
  misc_feature (33)..(33): n is a, c, g, or t
  misc_feature (36)..(36): n is a, c, g, or t
  misc_feature (42)..(42): n is a, c, g, or t
  misc_feature (48)..(48): n is a, c, g, or t
  misc_feature (51)..(51): n is a, c, g, or t
  misc_feature (54)..(54): n is a, c, g, or t
  misc_feature (57)..(57): n is a, c, g, or t
  misc_feature (63)..(63): n is a, c, g, or t
  misc_feature (66)..(66): n is a, c, g, or t
  misc_feature (72)..(72): n is a, c, g, or t
  misc_feature (75)..(75): n is a, c, g, or t
  misc_feature (78)..(78): n is a, c, g, or t
  misc_feature (84)..(84): n is a, c, g, or t
  misc_feature (87)..(87): n is a, c, g, or t
  misc_feature (93)..(93): n is a, c, g, or t
  misc_feature (96)..(96): n is a, c, g, or t
  misc_feature (99)..(99): n is a, c, g, or t
  misc_feature (102)..(102): n is a, c, g, or t
  misc_feature (105)..(105): n is a, c, g, or t
  misc_feature (114)..(114): n is a, c, g, or t
  misc_feature (123)..(123): n is a, c, g, or t
  misc_feature (126)..(126): n is a, c, g, or t
  misc_feature (129)..(129): n is a, c, g, or t
  misc_feature (132)..(132): n is a, c, g, or t
  misc_feature (135)..(135): n is a, c, g, or t
  misc_feature (138)..(138): n is a, c, g, or t
  misc_feature (141)..(141): n is a, c, g, or t
  misc_feature (144)..(144): n is a, c, g, or t
  misc_feature (147)..(147): n is a, c, g, or t
  misc_feature (150)..(150): n is a, c, g, or t
  misc_feature (159)..(159): n is a, c, g, or t
  misc_feature (162)..(162): n is a, c, g, or t
  misc_feature (168)..(168): n is a, c, g, or t
  misc_feature (171)..(171): n is a, c, g, or t
  misc_feature (177)..(177): n is a, c, g, or t
  misc_feature (180)..(180): n is a, c, g, or t
  misc_feature (183)..(183): n is a, c, g, or t
  misc_feature (189)..(189): n is a, c, g, or t
  misc_feature (195)..(195): n is a, c, g, or t
  misc_feature (198)..(198): n is a, c, g, or t
  misc_feature (201)..(201): n is a, c, g, or t
  misc_feature (207)..(207): n is a, c, g, or t
  misc_feature (210)..(210): n is a, c, g, or t
  misc_feature (216)..(216): n is a, c, g, or t
  misc_feature (219)..(219): n is a, c, g, or t
  misc_feature (222)..(222): n is a, c, g, or t
  misc_feature (225)..(225): n is a, c, g, or t
  misc_feature (231)..(231): n is a, c, g, or t
  misc_feature (234)..(234): n is a, c, g, or t
  misc_feature (237)..(237): n is a, c, g, or t
  misc_feature (243)..(243): n is a, c, g, or t
  misc_feature (246)..(246): n is a, c, g, or t
  misc_feature (249)..(249): n is a, c, g, or t
  misc_feature (252)..(252): n is a, c, g, or t
  misc_feature (255)..(255): n is a, c, g, or t
  misc_feature (264)..(264): n is a, c, g, or t
  misc_feature (267)..(267): n is a, c, g, or t
  misc_feature (273)..(273): n is a, c, g, or t
  misc_feature (276)..(276): n is a, c, g, or t
  misc_feature (282)..(282): n is a, c, g, or t
  misc_feature (285)..(285): n is a, c, g, or t
  misc_feature (291)..(291): n is a, c, g, or t
  misc_feature (294)..(294): n is a, c, g, or t
  misc_feature (303)..(303): n is a, c, g, or t
  misc_feature (306)..(306): n is a, c, g, or t
  misc_feature (312)..(312): n is a, c, g, or t
  misc_feature (315)..(315): n is a, c, g, or t
  misc_feature (324)..(324): n is a, c, g, or t
  misc_feature (327)..(327): n is a, c, g, or t
  misc_feature (333)..(333): n is a, c, g, or t
  misc_feature (339)..(339): n is a, c, g, or t
  misc_feature (342)..(342): n is a, c, g, or t
  misc_feature (345)..(345): n is a, c, g, or t
  misc_feature (348)..(348): n is a, c, g, or t
ggnathwsngcnwsncargcngargarwsngcngcnaaygcngayacnwsngcnggngaygcnwsngarwsngcnmgncargcngcngarwsngcngcngcngcnaarcarwsngargargcnwsnwsnwsnwsngcnwsngcngcngcncaraargcnwsngarwsnwsncarwsngcngcngargcngarytnwsnmgnaaracngcngarwsngcngcnggnaaygcngcnmgngaygcnacnacngcnacngaraargcnmgngarwsngcngarwsngcncarwsngcngarcarwsnmgnathgcngcngargargcngtnaaymgnathccnacngtngtn

SEQ ID NO: 852 - DNA, 348 bp, Artificial Sequence
  PCoil-CNA14
  misc_feature (3)..(3): n is a, c, g, or t
  misc_feature (9)..(9): n is a, c, g, or t
  misc_feature (12)..(12): n is a, c, g, or t
  misc_feature (15)..(15): n is a, c, g, or t
  misc_feature (21)..(21): n is a, c, g, or t
  misc_feature (30)..(30): n is a, c, g, or t
  misc_feature (33)..(33): n is a, c, g, or t
  misc_feature (36)..(36): n is a, c, g, or t
  misc_feature (42)..(42): n is a, c, g, or t
  misc_feature (48)..(48): n is a, c, g, or t
  misc_feature (51)..(51): n is a, c, g, or t
  misc_feature (54)..(54): n is a, c, g, or t
  misc_feature (57)..(57): n is a, c, g, or t
  misc_feature (63)..(63): n is a, c, g, or t
  misc_feature (66)..(66): n is a, c, g, or t
  misc_feature (72)..(72): n is a, c, g, or t
  misc_feature (75)..(75): n is a, c, g, or t
  misc_feature (78)..(78): n is a, c, g, or t
  misc_feature (84)..(84): n is a, c, g, or t
  misc_feature (87)..(87): n is a, c, g, or t
  misc_feature (93)..(93): n is a, c, g, or t
  misc_feature (96)..(96): n is a, c, g, or t
  misc_feature (99)..(99): n is a, c, g, or t
  misc_feature (102)..(102): n is a, c, g, or t
  misc_feature (105)..(105): n is a, c, g, or t
  misc_feature (114)..(114): n is a, c, g, or t
  misc_feature (123)..(123): n is a, c, g, or t
  misc_feature (126)..(126): n is a, c, g, or t
  misc_feature (129)..(129): n is a, c, g, or t
  misc_feature (132)..(132): n is a, c, g, or t
  misc_feature (135)..(135): n is a, c, g, or t
  misc_feature (138)..(138): n is a, c, g, or t
  misc_feature (141)..(141): n is a, c, g, or t
  misc_feature (144)..(144): n is a, c, g, or t
  misc_feature (147)..(147): n is a, c, g, or t
  misc_feature (150)..(150): n is a, c, g, or t
  misc_feature (159)..(159): n is a, c, g, or t
  misc_feature (162)..(162): n is a, c, g, or t
  misc_feature (168)..(168): n is a, c, g, or t
  misc_feature (171)..(171): n is a, c, g, or t
  misc_feature (177)..(177): n is a, c, g, or t
  misc_feature (180)..(180): n is a, c, g, or t
  misc_feature (183)..(183): n is a, c, g, or t
  misc_feature (189)..(189): n is a, c, g, or t
  misc_feature (195)..(195): n is a, c, g, or t
  misc_feature (198)..(198): n is a, c, g, or t
  misc_feature (201)..(201): n is a, c, g, or t
  misc_feature (207)..(207): n is a, c, g, or t
  misc_feature (210)..(210): n is a, c, g, or t
  misc_feature (216)..(216): n is a, c, g, or t
  misc_feature (219)..(219): n is a, c, g, or t
  misc_feature (222)..(222): n is a, c, g, or t
  misc_feature (225)..(225): n is a, c, g, or t
  misc_feature (231)..(231): n is a, c, g, or t
  misc_feature (234)..(234): n is a, c, g, or t
  misc_feature (237)..(237): n is a, c, g, or t
  misc_feature (243)..(243): n is a, c, g, or t
  misc_feature (246)..(246): n is a, c, g, or t
  misc_feature (249)..(249): n is a, c, g, or t
  misc_feature (252)..(252): n is a, c, g, or t
  misc_feature (255)..(255): n is a, c, g, or t
  misc_feature (264)..(264): n is a, c, g, or t
  misc_feature (267)..(267): n is a, c, g, or t
  misc_feature (273)..(273): n is a, c, g, or t
  misc_feature (276)..(276): n is a, c, g, or t
  misc_feature (282)..(282): n is a, c, g, or t
  misc_feature (285)..(285): n is a, c, g, or t
  misc_feature (291)..(291): n is a, c, g, or t
  misc_feature (294)..(294): n is a, c, g, or t
  misc_feature (303)..(303): n is a, c, g, or t
  misc_feature (306)..(306): n is a, c, g, or t
  misc_feature (312)..(312): n is a, c, g, or t
  misc_feature (315)..(315): n is a, c, g, or t
  misc_feature (324)..(324): n is a, c, g, or t
  misc_feature (327)..(327): n is a, c, g, or t
  misc_feature (333)..(333): n is a, c, g, or t
  misc_feature (339)..(339): n is a, c, g, or t
  misc_feature (342)..(342): n is a, c, g, or t
  misc_feature (345)..(345): n is a, c, g, or t
  misc_feature (348)..(348): n is a, c, g, or t
ggnathwsngcnwsncargcngargarwsngcngcncaygcngayacnwsngcnggngaygcnwsngarwsngcnmgncargcngcngarwsngcngcngcngcnaarcarwsngargargcnwsnwsnwsnwsngcnwsngcngcngcncaraargcnwsngarwsnwsncarwsngcngcngargcngarytnwsnmgnaaracngcngarwsngcngcnggnaaygcngcnmgngaygcnacnacngcnacngaraargcnmgngarwsngcngarwsngcncarwsngcngarcarwsnmgnathgcngcngargargcngtnaaymgnathccnacngtngtn

SEQ ID NO: 853 - DNA, 348 bp, Artificial Sequence
  PCoil-CNA15
  misc_feature (3)..(3): n is a, c, g, or t
  misc_feature (9)..(9): n is a, c, g, or t
  misc_feature (12)..(12): n is a, c, g, or t
  misc_feature (15)..(15): n is a, c, g, or t
  misc_feature (21)..(21): n is a, c, g, or t
  misc_feature (30)..(30): n is a, c, g, or t
  misc_feature (33)..(33): n is a, c, g, or t
  misc_feature (36)..(36): n is a, c, g, or t
  misc_feature (42)..(42): n is a, c, g, or t
  misc_feature (48)..(48): n is a, c, g, or t
  misc_feature (51)..(51): n is a, c, g, or t
  misc_feature (54)..(54): n is a, c, g, or t
  misc_feature (57)..(57): n is a, c, g, or t
  misc_feature (63)..(63): n is a, c, g, or t
  misc_feature (66)..(66): n is a, c, g, or t
  misc_feature (72)..(72): n is a, c, g, or t
  misc_feature (75)..(75): n is a, c, g, or t
  misc_feature (78)..(78): n is a, c, g, or t
  misc_feature (84)..(84): n is a, c, g, or t
  misc_feature (87)..(87): n is a, c, g, or t
  misc_feature (93)..(93): n is a, c, g, or t
  misc_feature (96)..(96): n is a, c, g, or t
  misc_feature (99)..(99): n is a, c, g, or t
  misc_feature (102)..(102): n is a, c, g, or t
  misc_feature (105)..(105): n is a, c, g, or t
  misc_feature (114)..(114): n is a, c, g, or t
  misc_feature (123)..(123): n is a, c, g, or t
  misc_feature (126)..(126): n is a, c, g, or t
  misc_feature (129)..(129): n is a, c, g, or t
  misc_feature (132)..(132): n is a, c, g, or t
  misc_feature (135)..(135): n is a, c, g, or t
  misc_feature (138)..(138): n is a, c, g, or t
  misc_feature (141)..(141): n is a, c, g, or t
  misc_feature (144)..(144): n is a, c, g, or t
  misc_feature (147)..(147): n is a, c, g, or t
  misc_feature (150)..(150): n is a, c, g, or t
  misc_feature (159)..(159): n is a, c, g, or t
  misc_feature (162)..(162): n is a, c, g, or t
  misc_feature (168)..(168): n is a, c, g, or t
  misc_feature (171)..(171): n is a, c, g, or t
  misc_feature (177)..(177): n is a, c, g, or t
  misc_feature (180)..(180): n is a, c, g, or t
  misc_feature (183)..(183): n is a, c, g, or t
  misc_feature (189)..(189): n is a, c, g, or t
  misc_feature (195)..(195): n is a, c, g, or t
  misc_feature (198)..(198): n is a, c, g, or t
  misc_feature (201)..(201): n is a, c, g, or t
  misc_feature (207)..(207): n is a, c, g, or t
  misc_feature (210)..(210): n is a, c, g, or t
  misc_feature (216)..(216): n is a, c, g, or t
  misc_feature (219)..(219): n is a, c, g, or t
  misc_feature (222)..(222): n is a, c, g, or t
  misc_feature (225)..(225): n is a, c, g, or t
  misc_feature (231)..(231): n is a, c, g, or t
  misc_feature (234)..(234): n is a, c, g, or t
  misc_feature (237)..(237): n is a, c, g, or t
  misc_feature (243)..(243): n is a, c, g, or t
  misc_feature (246)..(246): n is a, c, g, or t
  misc_feature (249)..(249): n is a, c, g, or t
  misc_feature (252)..(252): n is a, c, g, or t
  misc_feature (255)..(255): n is a, c, g, or t
  misc_feature (264)..(264): n is a, c, g, or t
  misc_feature (267)..(267): n is a, c, g, or t
  misc_feature (273)..(273): n is a, c, g, or t
  misc_feature (276)..(276): n is a, c, g, or t
  misc_feature (282)..(282): n is a, c, g, or t
  misc_feature (285)..(285): n is a, c, g, or t
  misc_feature (291)..(291): n is a, c, g, or t
  misc_feature (294)..(294): n is a, c, g, or t
  misc_feature (303)..(303): n is a, c, g, or t
  misc_feature (306)..(306): n is a, c, g, or t
  misc_feature (312)..(312): n is a, c, g, or t
  misc_feature (315)..(315): n is a, c, g, or t
  misc_feature (324)..(324): n is a, c, g, or t
  misc_feature (327)..(327): n is a, c, g, or t
  misc_feature (333)..(333): n is a, c, g, or t
  misc_feature (339)..(339): n is a, c, g, or t
  misc_feature (342)..(342): n is a, c, g, or t
  misc_feature (345)..(345): n is a, c, g, or t
  misc_feature (348)..(348): n is a, c, g, or t
ggnathwsngcnwsncargcngargarwsngcngcnaaygcngayacnwsngcnggngaygcnwsngarwsngcnmgncargcngcngarwsngcngcngcngcnaarcarwsngargargcnwsnwsnwsnwsngcnwsngcngcngcncaraargcnwsngarwsnwsncarwsngcngcngargcngarytnwsnmgnaaracngcngarwsngcngcnggnaaygcngcnmgngaygcnacnacngcnacngaraargcnmgngarwsngcngarwsngcncarwsngcngarcarwsnmgnathgcngcngargaygcngtnaaymgnathccnacngtngtn

SEQ ID NO: 854 - DNA, 348 bp, Artificial Sequence
  PCoil-CNA16
  misc_feature (3)..(3): n is a, c, g, or t
  misc_feature (9)..(9): n is a, c, g, or t
  misc_feature (12)..(12): n is a, c, g, or t
  misc_feature (15)..(15): n is a, c, g, or t
  misc_feature (21)..(21): n is a, c, g, or t
  misc_feature (33)..(33): n is a, c, g, or t
  misc_feature (36)..(36): n is a, c, g, or t
  misc_feature (42)..(42): n is a, c, g, or t
  misc_feature (48)..(48): n is a, c, g, or t
  misc_feature (51)..(51): n is a, c, g, or t
  misc_feature (54)..(54): n is a, c, g, or t
  misc_feature (57)..(57): n is a, c, g, or t
  misc_feature (63)..(63): n is a, c, g, or t
  misc_feature (66)..(66): n is a, c, g, or t
  misc_feature (72)..(72): n is a, c, g, or t
  misc_feature (75)..(75): n is a, c, g, or t
  misc_feature (78)..(78): n is a, c, g, or t
  misc_feature (84)..(84): n is a, c, g, or t
  misc_feature (87)..(87): n is a, c, g, or t
  misc_feature (93)..(93): n is a, c, g, or t
  misc_feature (96)..(96): n is a, c, g, or t
  misc_feature (99)..(99): n is a, c, g, or t
  misc_feature (102)..(102): n is a, c, g, or t
  misc_feature (105)..(105): n is a, c, g, or t
  misc_feature (114)..(114): n is a, c, g, or t
  misc_feature (123)..(123): n is a, c, g, or t
  misc_feature (126)..(126): n is a, c, g, or t
  misc_feature (129)..(129): n is a, c, g, or t
  misc_feature (132)..(132): n is a, c, g, or t
  misc_feature (135)..(135): n is a, c, g, or t
  misc_feature (138)..(138): n is a, c, g, or t
  misc_feature (141)..(141): n is a, c, g, or t
  misc_feature (144)..(144): n is a, c, g, or t
  misc_feature (147)..(147): n is a, c, g, or t
  misc_feature (150)..(150): n is a, c, g, or t
  misc_feature (159)..(159): n is a, c, g, or t
  misc_feature (162)..(162): n is a, c, g, or t
  misc_feature (168)..(168): n is a, c, g, or t
  misc_feature (171)..(171): n is a, c, g, or t
  misc_feature (177)..(177): n is a, c, g, or t
  misc_feature (180)..(180): n is a, c, g, or t
  misc_feature (183)..(183): n is a, c, g, or t
  misc_feature (189)..(189): n is a, c, g, or t
  misc_feature (195)..(195): n is a, c, g, or t
  misc_feature (198)..(198): n is a, c, g, or t
  misc_feature (201)..(201): n is a, c, g, or t
  misc_feature (207)..(207): n is a, c, g, or t
  misc_feature (210)..(210): n is a, c, g, or t
  misc_feature (216)..(216): n is a, c, g, or t
  misc_feature (219)..(219): n is a, c, g, or t
  misc_feature (222)..(222): n is a, c, g, or t
  misc_feature (225)..(225): n is a, c, g, or t
  misc_feature (231)..(231): n is a, c, g, or t
  misc_feature (234)..(234): n is a, c, g, or t
  misc_feature (237)..(237): n is a, c, g, or t
  misc_feature (243)..(243): n is a, c, g, or t
  misc_feature (246)..(246): n is a, c, g, or t
  misc_feature (249)..(249): n is a, c, g, or t
  misc_feature (252)..(252): n is a, c, g, or t
  misc_feature (255)..(255): n is a, c, g, or t
  misc_feature (264)..(264): n is a, c, g, or t
  misc_feature (267)..(267): n is a, c, g, or t
  misc_feature (273)..(273): n is a, c, g, or t
  misc_feature (276)..(276): n is a, c, g, or t
  misc_feature (282)..(282): n is a, c, g, or t
  misc_feature (285)..(285): n is a, c, g, or t
  misc_feature (291)..(291): n is a, c, g, or t
  misc_feature (294)..(294): n is a, c, g, or t
  misc_feature (303)..(303): n is a, c, g, or t
  misc_feature (306)..(306): n is a, c, g, or t
  misc_feature (312)..(312): n is a, c, g, or t
  misc_feature (315)..(315): n is a, c, g, or t
  misc_feature (324)..(324): n is a, c, g, or t
  misc_feature (327)..(327): n is a, c, g, or t
  misc_feature (333)..(333): n is a, c, g, or t
  misc_feature (339)..(339): n is a, c, g, or t
  misc_feature (342)..(342): n is a, c, g, or t
  misc_feature (345)..(345): n is a, c, g, or t
  misc_feature (348)..(348): n is a, c, g, or t
ggnathwsngcnwsncargcngargaraaygcngcnaaygcngayacnwsngcnggngaygcnwsngarwsngcnmgncargcngcngarwsngcngcngcngcnaarcarwsngargargcnwsnwsnwsnwsngcnwsngcngcngcncaraargcnwsngarwsnwsncarwsngcngcngargcngarytnwsnmgnaaracngcngarwsngcngcnggnaaygcnwsnmgngaygcnacnacngcngcngaraargcnmgngarwsngcngarwsngcncarwsngcngarcarwsnmgnathgcngcngargargcngtnaaymgnathccnacngtngtn

SEQ ID NO: 855 - DNA, 348 bp, Artificial Sequence
  PCoil-CNA17
  misc_feature (3)..(3): n is a, c, g, or t
  misc_feature (9)..(9): n is a, c, g, or t
  misc_feature (12)..(12): n is a, c, g, or t
  misc_feature (15)..(15): n is a, c, g, or t
  misc_feature (21)..(21): n is a, c, g, or t
  misc_feature (33)..(33): n is a, c, g, or t
  misc_feature (36)..(36): n is a, c, g, or t
  misc_feature (42)..(42): n is a, c, g, or t
  misc_feature (48)..(48): n is a, c, g, or t
  misc_feature (51)..(51): n is a, c, g, or t
  misc_feature (54)..(54): n is a, c, g, or t
  misc_feature (57)..(57): n is a, c, g, or t
  misc_feature (63)..(63): n is a, c, g, or t
  misc_feature (66)..(66): n is a, c, g, or t
  misc_feature (72)..(72): n is a, c, g, or t
  misc_feature (75)..(75): n is a, c, g, or t
  misc_feature (78)..(78): n is a, c, g, or t
  misc_feature (84)..(84): n is a, c, g, or t
  misc_feature (87)..(87): n is a, c, g, or t
  misc_feature (93)..(93): n is a, c, g, or t
  misc_feature (96)..(96): n is a, c, g, or t
  misc_feature (99)..(99): n is a, c, g, or t
  misc_feature (102)..(102): n is a, c, g, or t
  misc_feature (105)..(105): n is a, c, g, or t
  misc_feature (114)..(114): n is a, c, g, or t
  misc_feature (123)..(123): n is a, c, g, or t
  misc_feature (126)..(126): n is a, c, g, or t
  misc_feature (129)..(129): n is a, c, g, or t
  misc_feature (132)..(132): n is a, c, g, or t
  misc_feature (135)..(135): n is a, c, g, or t
  misc_feature (138)..(138): n is a, c, g, or t
  misc_feature (141)..(141): n is a, c, g, or t
  misc_feature (144)..(144): n is a, c, g, or t
  misc_feature (147)..(147): n is a, c, g, or t
  misc_feature (150)..(150): n is a, c, g, or t
  misc_feature (159)..(159): n is a, c, g, or t
  misc_feature (162)..(162): n is a, c, g, or t
  misc_feature (168)..(168): n is a, c, g, or t
  misc_feature (171)..(171): n is a, c, g, or t
  misc_feature (177)..(177): n is a, c, g, or t
  misc_feature (180)..(180): n is a, c, g, or t
  misc_feature (183)..(183): n is a, c, g, or t
  misc_feature (189)..(189): n is a, c, g, or t
  misc_feature (195)..(195): n is a, c, g, or t
  misc_feature (198)..(198): n is a, c, g, or t
  misc_feature (201)..(201): n is a, c, g, or t
  misc_feature (207)..(207): n is a, c, g, or t
  misc_feature (210)..(210): n is a, c, g, or t
  misc_feature (216)..(216): n is a, c, g, or t
  misc_feature (219)..(219): n is a, c, g, or t
  misc_feature (222)..(222): n is a, c, g, or t
  misc_feature (225)..(225): n is a, c, g, or t
  misc_feature (231)..(231): n is a, c, g, or t
  misc_feature (234)..(234): n is a, c, g, or t
  misc_feature (237)..(237): n is a, c, g, or t
  misc_feature (243)..(243): n is a, c, g, or t
  misc_feature (246)..(246): n is a, c, g, or t
  misc_feature (249)..(249): n is a, c, g, or t
  misc_feature (252)..(252): n is a, c, g, or t
  misc_feature (255)..(255): n is a, c, g, or t
  misc_feature (264)..(264): n is a, c, g, or t
  misc_feature (267)..(267): n is a, c, g, or t
  misc_feature (273)..(273): n is a, c, g, or t
  misc_feature (276)..(276): n is a, c, g, or t
  misc_feature (282)..(282): n is a, c, g, or t
  misc_feature (285)..(285): n is a, c, g, or t
  misc_feature (291)..(291): n is a, c, g, or t
  misc_feature (294)..(294): n is a, c, g, or t
  misc_feature (303)..(303): n is a, c, g, or t
  misc_feature (306)..(306): n is a, c, g, or t
  misc_feature (312)..(312): n is a, c, g, or t
  misc_feature (315)..(315): n is a, c, g, or t
  misc_feature (324)..(324): n is a, c, g, or t
  misc_feature (327)..(327): n is a, c, g, or t
  misc_feature (333)..(333): n is a, c, g, or t
  misc_feature (339)..(339): n is a, c, g, or t
  misc_feature (342)..(342): n is a, c, g, or t
  misc_feature (345)..(345): n is a, c, g, or t
  misc_feature (348)..(348): n is a, c, g, or t
ggnathwsngcnwsncargcngargaraaygcngcnaaygcngayacnwsngcnggngaygcnwsngarwsngcnmgncargcngcngarwsngcngcngcngcnaarcarwsngargargcnwsnwsnwsnwsngcnwsngcngcngcncaraargcnwsngarwsnwsncarwsngcngcngargcngarytnwsnmgnaaracngcngarwsngcngcnggnaaygcngtnmgngaygcnacnacngcnacngaraargcnmgngarwsngcngarwsngcncarwsngcngarcarwsnmgnathgcngcngargargcngtnaaymgnathccnacngtngtn

SEQ ID NO: 856 - DNA, 348 bp, Artificial Sequence
  PCoil-CNA18
  misc_feature (3)..(3): n is a, c, g, or t
  misc_feature (9)..(9): n is a, c, g, or t
  misc_feature (12)..(12): n is a, c, g, or t
  misc_feature (15)..(15): n is a, c, g, or t
  misc_feature (21)..(21): n is a, c, g, or t
  misc_feature (33)..(33): n is a, c, g, or t
  misc_feature (36)..(36): n is a, c, g, or t
  misc_feature (42)..(42): n is a, c, g, or t
  misc_feature (48)..(48): n is a, c, g, or t
  misc_feature (51)..(51): n is a, c, g, or t
  misc_feature (54)..(54): n is a, c, g, or t
  misc_feature (57)..(57): n is a, c, g, or t
  misc_feature (63)..(63): n is a, c, g, or t
  misc_feature (66)..(66): n is a, c, g, or t
  misc_feature (72)..(72): n is a, c, g, or t
  misc_feature (75)..(75): n is a, c, g, or t
  misc_feature (78)..(78): n is a, c, g, or t
  misc_feature (84)..(84): n is a, c, g, or t
  misc_feature (87)..(87): n is a, c, g, or t
  misc_feature (93)..(93): n is a, c, g, or t
  misc_feature (96)..(96): n is a, c, g, or t
  misc_feature (99)..(99): n is a, c, g, or t
  misc_feature (102)..(102): n is a, c, g, or t
  misc_feature (105)..(105): n is a, c, g, or t
  misc_feature (114)..(114): n is a, c, g, or t
  misc_feature (123)..(123): n is a, c, g, or t
  misc_feature (126)..(126): n is a, c, g, or t
  misc_feature (129)..(129): n is a, c, g, or t
  misc_feature (132)..(132): n is a, c, g, or t
  misc_feature (135)..(135): n is a, c, g, or t
  misc_feature (138)..(138): n is a, c, g, or t
  misc_feature (141)..(141): n is a, c, g, or t
  misc_feature (144)..(144): n is a, c, g, or t
  misc_feature (147)..(147): n is a, c, g, or t
  misc_feature (150)..(150): n is a, c, g, or t
  misc_feature (159)..(159): n is a, c, g, or t
  misc_feature (162)..(162): n is a, c, g, or t
  misc_feature (168)..(168): n is a, c, g, or t
  misc_feature (171)..(171): n is a, c, g, or t
  misc_feature (177)..(177): n is a, c, g, or t
  misc_feature (180)..(180): n is a, c, g, or t
  misc_feature (183)..(183): n is a, c, g, or t
  misc_feature (189)..(189): n is a, c, g, or t
  misc_feature (195)..(195): n is a, c, g, or t
  misc_feature (198)..(198): n is a, c, g, or t
  misc_feature (201)..(201): n is a, c, g, or t
  misc_feature (207)..(207): n is a, c, g, or t
  misc_feature (210)..(210): n is a, c, g, or t
  misc_feature (216)..(216): n is a, c, g, or t
  misc_feature (219)..(219): n is a, c, g, or t
  misc_feature (222)..(222): n is a, c, g, or t
  misc_feature (225)..(225): n is a, c, g, or t
  misc_feature (231)..(231): n is a, c, g, or t
  misc_feature (234)..(234): n is a, c, g, or t
  misc_feature (237)..(237): n is a, c, g, or t
  misc_feature (243)..(243): n is a, c, g, or t
  misc_feature (246)..(246): n is a, c, g, or t
  misc_feature (249)..(249): n is a, c, g, or t
  misc_feature (252)..(252): n is a, c, g, or t
  misc_feature (255)..(255): n is a, c, g, or t
  misc_feature (264)..(264): n is a, c, g, or t
  misc_feature (267)..(267): n is a, c, g, or t
  misc_feature (273)..(273): n is a, c, g, or t
  misc_feature (276)..(276): n is a, c, g, or t
  misc_feature (282)..(282): n is a, c, g, or t
  misc_feature (285)..(285): n is a, c, g, or t
  misc_feature (291)..(291): n is a, c, g, or t
  misc_feature (294)..(294): n is a, c, g, or t
  misc_feature (303)..(303): n is a, c, g, or t
  misc_feature (306)..(306): n is a, c, g, or t
  misc_feature (312)..(312): n is a, c, g, or t
  misc_feature (315)..(315): n is a, c, g, or t
  misc_feature (324)..(324): n is a, c, g, or t
  misc_feature (327)..(327): n is a, c, g, or t
  misc_feature (333)..(333): n is a, c, g, or t
  misc_feature (339)..(339): n is a, c, g, or t
  misc_feature (342)..(342): n is a, c, g, or t
  misc_feature (345)..(345): n is a, c, g, or t
  misc_feature (348)..(348): n is a, c, g, or t
ggnathwsngcnwsncargcngargaraaygcngcnaaygcngayacnwsngcnggngaygcnwsngarwsngcnmgncargcngcngarwsngcngcngcngcnaarcarwsngargargcnwsnwsnwsnwsngcnwsngcngcngcncaraargcnwsngarwsnwsncarwsngcngcngargcngarytnwsnmgnaaracngcngarwsngcngcnggnaaygcngcnmgngaygcnacnacngcnacngaraargcnmgngarwsngcngarwsngcncarwsngcngarcarwsnmgnathgcngcngargargcngtnaaymgnathccnacngtngtn

SEQ ID NO: 857 - DNA, 348 bp, Artificial Sequence
  PCoil-CNA19
  misc_feature (3)..(3): n is a, c, g, or t
  misc_feature (9)..(9): n is a, c, g, or t
  misc_feature (12)..(12): n is a, c, g, or t
  misc_feature (15)..(15): n is a, c, g, or t
  misc_feature (21)..(21): n is a, c, g, or t
  misc_feature (30)..(30): n is a, c, g, or t
  misc_feature (33)..(33): n is a, c, g, or t
  misc_feature (36)..(36): n is a, c, g, or t
  misc_feature (42)..(42): n is a, c, g, or t
  misc_feature (48)..(48): n is a, c, g, or t
  misc_feature (51)..(51): n is a, c, g, or t
  misc_feature (54)..(54): n is a, c, g, or t
  misc_feature (57)..(57): n is a, c, g, or t
  misc_feature (63)..(63): n is a, c, g, or t
  misc_feature (66)..(66): n is a, c, g, or t
  misc_feature (72)..(72): n is a, c, g, or t
  misc_feature (75)..(75): n is a, c, g, or t
  misc_feature (78)..(78): n is a, c, g, or t
  misc_feature (84)..(84): n is a, c, g, or t
  misc_feature (87)..(87): n is a, c, g, or t
  misc_feature (93)..(93): n is a, c, g, or t
  misc_feature (96)..(96): n is a, c, g, or t
  misc_feature (99)..(99): n is a, c, g, or t
  misc_feature (102)..(102): n is a, c, g, or t
  misc_feature (105)..(105): n is a, c, g, or t
  misc_feature (114)..(114): n is a, c, g, or t
  misc_feature (123)..(123): n is a, c, g, or t
  misc_feature (126)..(126): n is a, c, g, or t
  misc_feature (129)..(129): n is a, c, g, or t
  misc_feature (132)..(132): n is a, c, g, or t
  misc_feature (135)..(135): n is a, c, g, or t
  misc_feature (138)..(138): n is a, c, g, or t
  misc_feature (141)..(141): n is a, c, g, or t
  misc_feature (144)..(144): n is a, c, g, or t
  misc_feature (147)..(147): n is a, c, g, or t
  misc_feature (150)..(150): n is a, c, g, or t
  misc_feature (159)..(159): n is a, c, g, or t
  misc_feature (162)..(162): n is a, c, g, or t
  misc_feature (168)..(168): n is a, c, g, or t
  misc_feature (171)..(171): n is a, c, g, or t
  misc_feature (177)..(177): n is a, c, g, or t
  misc_feature (180)..(180): n is a, c, g, or t
  misc_feature (183)..(183): n is a, c, g, or t
  misc_feature (189)..(189): n is a, c, g, or t
  misc_feature (195)..(195): n is a, c, g, or t
  misc_feature (198)..(198): n is a, c, g, or t
  misc_feature (201)..(201): n is a, c, g, or t
  misc_feature (207)..(207): n is a, c, g, or t
  misc_feature (210)..(210): n is a, c, g, or t
  misc_feature (216)..(216): n is a, c, g, or t
  misc_feature (219)..(219): n is a, c, g, or t
  misc_feature (222)..(222): n is a, c, g, or t
  misc_feature (225)..(225): n is a, c, g, or t
  misc_feature (231)..(231): n is a, c, g, or t
  misc_feature (234)..(234): n is a, c, g, or t
  misc_feature (237)..(237): n is a, c, g, or t
  misc_feature (243)..(243): n is a, c, g, or t
  misc_feature (246)..(246): n is a, c, g, or t
  misc_feature (249)..(249): n is a, c, g, or t
  misc_feature (252)..(252): n is a, c, g, or t
  misc_feature (255)..(255): n is a, c, g, or t
  misc_feature (264)..(264): n is a, c, g, or t
  misc_feature (267)..(267): n is a, c, g, or t
  misc_feature (273)..(273): n is a, c, g, or t
  misc_feature (276)..(276): n is a, c, g, or t
  misc_feature (282)..(282): n is a, c, g, or t
  misc_feature (285)..(285): n is a, c, g, or t
  misc_feature (291)..(291): n is a, c, g, or t
  misc_feature (294)..(294): n is a, c, g, or t
  misc_feature (303)..(303): n is a, c, g, or t
  misc_feature (306)..(306): n is a, c, g, or t
  misc_feature (312)..(312): n is a, c, g, or t
  misc_feature (315)..(315): n is a, c, g, or t
  misc_feature (324)..(324): n is a, c, g, or t
  misc_feature (327)..(327): n is a, c, g, or t
  misc_feature (333)..(333): n is a, c, g, or t
  misc_feature (339)..(339): n is a, c, g, or t
  misc_feature (342)..(342): n is a, c, g, or t
  misc_feature (345)..(345): n is a, c, g, or t
  misc_feature (348)..(348): n is a, c, g, or t
ggnathwsngcnwsncargcngargarwsngcngcnaaygcngayacnwsngcnggngargcnwsngarwsngcnmgncargcngcngarwsngcngcngcngcnaarcarwsngargargcnwsnwsnwsnwsngcnwsngcngcngcncaraargcnwsngarwsnwsncarwsngcngcngargcngarytnwsnmgnaaracngcngarwsngcngcnggnaaygcngcnmgngaygcnacnacngcnacngaraargcnmgngarwsngcngarwsngcncarwsngcngarcarwsnmgnathgcngcngargargcngtnaaymgnathccnacngtngtn

SEQ ID NO: 858 - DNA, 345 bp, Artificial Sequence
  PCoil-CNA20
  misc_feature (3)..(3): n is a, c, g, or t
  misc_feature (9)..(9): n is a, c, g, or t
  misc_feature (12)..(12): n is a, c, g, or t
  misc_feature (15)..(15): n is a, c, g, or t
  misc_feature (21)..(21): n is a, c, g, or t
  misc_feature (30)..(30): n is a, c, g, or t
  misc_feature (33)..(33): n is a, c, g, or t
  misc_feature (36)..(36): n is a, c, g, or t
  misc_feature (42)..(42): n is a, c, g, or t
  misc_feature (48)..(48): n is a, c, g, or t
  misc_feature (51)..(51): n is a, c, g, or t
  misc_feature (54)..(54): n is a, c, g, or t
  misc_feature (57)..(57): n is a, c, g, or t
  misc_feature (63)..(63): n is a, c, g, or t
  misc_feature (66)..(66): n is a, c, g, or t
  misc_feature (72)..(72): n is a, c, g, or t
  misc_feature (75)..(75): n is a, c, g, or t
  misc_feature (78)..(78): n is a, c, g, or t
  misc_feature (84)..(84): n is a, c, g, or t
  misc_feature (87)..(87): n is a, c, g, or t
  misc_feature (93)..(93): n is a, c, g, or t
  misc_feature (96)..(96): n is a, c, g, or t
  misc_feature (99)..(99): n is a, c, g, or t
  misc_feature (102)..(102): n is a, c, g, or t
  misc_feature (105)..(105): n is a, c, g, or t
  misc_feature (114)..(114): n is a, c, g, or t
  misc_feature (123)..(123): n is a, c, g, or t
  misc_feature (126)..(126): n is a, c, g, or t
  misc_feature (129)..(129): n is a, c, g, or t
  misc_feature (132)..(132): n is a, c, g, or t
  misc_feature (135)..(135): n is a, c, g, or t
  misc_feature (138)..(138): n is a, c, g, or t
  misc_feature (141)..(141): n is a, c, g, or t
  misc_feature (144)..(144): n is a, c, g, or t
  misc_feature (147)..(147): n is a, c, g, or t
  misc_feature (150)..(150): n is a, c, g, or t
  misc_feature (159)..(159): n is a, c, g, or t
  misc_feature (162)..(162): n is a, c, g, or t
  misc_feature (168)..(168): n is a, c, g, or t
  misc_feature (171)..(171): n is a, c, g, or t
  misc_feature (177)..(177): n is a, c, g, or t
  misc_feature (180)..(180): n is a, c, g, or t
  misc_feature (183)..(183): n is a, c, g, or t
  misc_feature (189)..(189): n is a, c, g, or t
  misc_feature (195)..(195): n is a, c, g, or t
  misc_feature (198)..(198): n is a, c, g, or t
  misc_feature (201)..(201): n is a, c, g, or t
  misc_feature (207)..(207): n is a, c, g, or t
  misc_feature (210)..(210): n is a, c, g, or t
  misc_feature (216)..(216): n is a, c, g, or t
  misc_feature (219)..(219): n is a, c, g, or t
  misc_feature (222)..(222): n is a, c, g, or t
  misc_feature (225)..(225): n is a, c, g, or t
  misc_feature (231)..(231): n is a, c, g, or t
  misc_feature (234)..(234): n is a, c, g, or t
  misc_feature (237)..(237): n is a, c, g, or t
  misc_feature (243)..(243): n is a, c, g, or t
  misc_feature (246)..(246): n is a, c, g, or t
  misc_feature (249)..(249): n is a, c, g, or t
  misc_feature (252)..(252): n is a, c, g, or t
  misc_feature (255)..(255): n is a, c, g, or t
  misc_feature (264)..(264): n is a, c, g, or t
  misc_feature (267)..(267): n is a, c, g, or t
  misc_feature (273)..(273): n is a, c, g, or t
  misc_feature (276)..(276): n is a, c, g, or t
  misc_feature (282)..(282): n is a, c, g, or t
  misc_feature (285)..(285): n is a, c, g, or t
  misc_feature (291)..(291): n is a, c, g, or t
  misc_feature (294)..(294): n is a, c, g, or t
  misc_feature (303)..(303): n is a, c, g, or t
  misc_feature (306)..(306): n is a, c, g, or t
  misc_feature (312)..(312): n is a, c, g, or t
  misc_feature (315)..(315): n is a, c, g, or t
  misc_feature (321)..(321): n is a, c, g, or t
  misc_feature (324)..(324): n is a, c, g, or t
  misc_feature (330)..(330): n is a, c, g, or t
  misc_feature (336)..(336): n is a, c, g, or t
  misc_feature (339)..(339): n is a, c, g, or t
  misc_feature (342)..(342): n is a, c, g, or t
  misc_feature (345)..(345): n is a, c, g, or t
ggnathwsngcnwsncargcngargarwsngcngcnaaygcngayacnwsngcnggngargcnwsngarwsngcnmgncargcngcngarwsngcngcngcngcnaarcarwsngargargcnwsnwsnwsnwsngcnwsngcngcngcncaraargcnwsngarwsnwsncarwsngcngcngargcngarytnwsnmgnaaracngcngarwsngcngcnggnaaygcngcnmgngaygcnacnacngcnacngaraargcnmgngarwsngcngarwsngcncarwsngcngarcarwsnmgnathgcngcngargcngtnaaymgnathccnacngtngtn

SEQ ID NO: 859 - DNA, 348 bp, Artificial Sequence
  PCoil-CNA21
  misc_feature (3)..(3): n is a, c, g, or t
  misc_feature (9)..(9): n is a, c, g, or t
  misc_feature (12)..(12): n is a, c, g, or t
  misc_feature (15)..(15): n is a, c, g, or t
  misc_feature (21)..(21): n is a, c, g, or t
  misc_feature (30)..(30): n is a, c, g, or t
  misc_feature (33)..(33): n is a, c, g, or t
  misc_feature (36)..(36): n is a, c, g, or t
  misc_feature (42)..(42): n is a, c, g, or t
  misc_feature (48)..(48): n is a, c, g, or t
  misc_feature (51)..(51): n is a, c, g, or t
  misc_feature (54)..(54): n is a, c, g, or t
  misc_feature (57)..(57): n is a, c, g, or t
  misc_feature (63)..(63): n is a, c, g, or t
  misc_feature (66)..(66): n is a, c, g, or t
  misc_feature (72)..(72): n is a, c, g, or t
  misc_feature (75)..(75): n is a, c, g, or t
  misc_feature (78)..(78): n is a, c, g, or t
  misc_feature (84)..(84): n is a, c, g, or t
  misc_feature (87)..(87): n is a, c, g, or t
  misc_feature (93)..(93): n is a, c, g, or t
  misc_feature (96)..(96): n is a, c, g, or t
  misc_feature (99)..(99): n is a, c, g, or t
  misc_feature (102)..(102): n is a, c, g, or t
  misc_feature (105)..(105): n is a, c, g, or t
  misc_feature (114)..(114): n is a, c, g, or t
  misc_feature (123)..(123): n is a, c, g, or t
  misc_feature (126)..(126): n is a, c, g, or t
  misc_feature (129)..(129): n is a, c, g, or t
  misc_feature (132)..(132): n is a, c, g, or t
  misc_feature (135)..(135): n is a, c, g, or t
  misc_feature (138)..(138): n is a, c, g, or t
  misc_feature (141)..(141): n is a, c, g, or t
  misc_feature (144)..(144): n is a, c, g, or t
  misc_feature (147)..(147): n is a, c, g, or t
  misc_feature (150)..(150): n is a, c, g, or t
  misc_feature (159)..(159): n is a, c, g, or t
  misc_feature (162)..(162): n is a, c, g, or t
  misc_feature (168)..(168): n is a, c, g, or t
  misc_feature (171)..(171): n is a, c, g, or t
  misc_feature (177)..(177): n is a, c, g, or t
  misc_feature (180)..(180): n is a, c, g, or t
  misc_feature (183)..(183): n is a, c, g, or t
  misc_feature (189)..(189): n is a, c, g, or t
  misc_feature (195)..(195): n is a, c, g, or t
  misc_feature (198)..(198): n is a, c, g, or t
  misc_feature (201)..(201): n is a, c, g, or t
  misc_feature (207)..(207): n is a, c, g, or t
  misc_feature (210)..(210): n is a, c, g, or t
  misc_feature (216)..(216): n is a, c, g, or t
  misc_feature (219)..(219): n is a, c, g, or t
  misc_feature (222)..(222): n is a, c, g, or t
  misc_feature (225)..(225): n is a, c, g, or t
  misc_feature (231)..(231): n is a, c, g, or t
  misc_feature (234)..(234): n is a, c, g, or t
  misc_feature (237)..(237): n is a, c, g, or t
  misc_feature (243)..(243): n is a, c, g, or t
  misc_feature (246)..(246): n is a, c, g, or t
  misc_feature (249)..(249): n is a, c, g, or t
  misc_feature (252)..(252): n is a, c, g, or t
  misc_feature (255)..(255): n is a, c, g, or t
  misc_feature (264)..(264): n is a, c, g, or t
  misc_feature (267)..(267): n is a, c, g, or t
  misc_feature (273)..(273): n is a, c, g, or t
  misc_feature (276)..(276): n is a, c, g, or t
  misc_feature (282)..(282): n is a, c, g, or t
  misc_feature (285)..(285): n is a, c, g, or t
  misc_feature (291)..(291): n is a, c, g, or t
  misc_feature (294)..(294): n is a, c, g, or t
  misc_feature (303)..(303): n is a, c, g, or t
  misc_feature (306)..(306): n is a, c, g, or t
  misc_feature (312)..(312): n is a, c, g, or t
  misc_feature (315)..(315): n is a, c, g, or t
  misc_feature (324)..(324): n is a, c, g, or t
  misc_feature (327)..(327): n is a, c, g, or t
  misc_feature (333)..(333): n is a, c, g, or t
  misc_feature (339)..(339): n is a, c, g, or t
  misc_feature (342)..(342): n is a, c, g, or t
  misc_feature (345)..(345): n is a, c, g, or t
  misc_feature (348)..(348): n is a, c, g, or t
ggnathwsngcnwsncargcngargarggngcngcnaaygcngayacnwsngcnggngargcnwsngarwsngcnmgncargcngcngarwsngcngcngcngcnaarcarwsngargargcnwsnwsnwsnwsngcnwsngcngcngcncaraargcnwsngarwsnwsncarwsngcngcngargcngarytnwsnmgnaaracngcngarwsngcngcnggnaaygcngcnmgngaygcnacnacngcnacngaraargcnmgngarwsngcngarwsngcncarwsngcngarcarwsnmgnathgcngcngargargcngtnaaymgnathccnacngtngtn

SEQ ID NO: 860 - DNA, 348 bp, Artificial Sequence
  PCoil-CNA22
  misc_feature (3)..(3): n is a, c, g, or t
  misc_feature (9)..(9): n is a, c, g, or t
  misc_feature (12)..(12): n is a, c, g, or t
  misc_feature (15)..(15): n is a, c, g, or t
  misc_feature (21)..(21): n is a, c, g, or t
  misc_feature (27)..(27): n is a, c, g, or t
  misc_feature (30)..(30): n is a, c, g, or t
  misc_feature (33)..(33): n is a, c, g, or t
  misc_feature (36)..(36): n is a, c, g, or t
  misc_feature (42)..(42): n is a, c, g, or t
  misc_feature (48)..(48): n is a, c, g, or t
  misc_feature (51)..(51): n is a, c, g, or t
  misc_feature (54)..(54): n is a, c, g, or t
  misc_feature (57)..(57): n is a, c, g, or t
  misc_feature (63)..(63): n is a, c, g, or t
  misc_feature (66)..(66): n is a, c, g, or t
  misc_feature (72)..(72): n is a, c, g, or t
  misc_feature (75)..(75): n is a, c, g, or t
  misc_feature (78)..(78): n is a, c, g, or t
  misc_feature (84)..(84): n is a, c, g, or t
  misc_feature (87)..(87): n is a, c, g, or t
  misc_feature (93)..(93): n is a, c, g, or t
  misc_feature (96)..(96): n is a, c, g, or t
  misc_feature (99)..(99): n is a, c, g, or t
  misc_feature (102)..(102): n is a, c, g, or t
  misc_feature (105)..(105): n is a, c, g, or t
  misc_feature (114)..(114): n is a, c, g, or t
  misc_feature (123)..(123): n is a, c, g, or t
  misc_feature (126)..(126): n is a, c, g, or t
  misc_feature (129)..(129): n is a, c, g, or t
  misc_feature (132)..(132): n is a, c, g, or t
  misc_feature (135)..(135): n is a, c, g, or t
  misc_feature (138)..(138): n is a, c, g, or t
  misc_feature (141)..(141): n is a, c, g, or t
  misc_feature (144)..(144): n is a, c, g, or t
  misc_feature (147)..(147): n is a, c, g, or t
  misc_feature (150)..(150): n is a, c, g, or t
  misc_feature (159)..(159): n is a, c, g, or t
  misc_feature (162)..(162): n is a, c, g, or t
  misc_feature (168)..(168): n is a, c, g, or t
  misc_feature (171)..(171): n is a, c, g, or t
  misc_feature (177)..(177): n is a, c, g, or t
  misc_feature (180)..(180): n is a, c, g, or t
  misc_feature (183)..(183): n is a, c, g, or t
  misc_feature (189)..(189): n is a, c, g, or t
  misc_feature (195)..(195): n is a, c, g, or t
  misc_feature (198)..(198): n is a, c, g, or t
  misc_feature (201)..(201): n is a, c, g, or t
  misc_feature (207)..(207): n is a, c, g, or t
  misc_feature (210)..(210): n is a, c, g, or t
  misc_feature (216)..(216): n is a, c, g, or t
  misc_feature (219)..(219): n is a, c, g, or t
  misc_feature (222)..(222): n is a, c, g, or t
  misc_feature (225)..(225): n is a, c, g, or t
  misc_feature (231)..(231): n is a, c, g, or t
  misc_feature (234)..(234): n is a, c, g, or t
  misc_feature (237)..(237): n is a, c, g, or t
  misc_feature (243)..(243): n is a, c, g, or t
  misc_feature (246)..(246): n is a, c, g, or t
  misc_feature (249)..(249): n is a, c, g, or t
  misc_feature (252)..(252): n is a, c, g, or t
  misc_feature (255)..(255): n is a, c, g, or t
  misc_feature (264)..(264): n is a, c, g, or t
  misc_feature (267)..(267): n is a, c, g, or t
  misc_feature (273)..(273): n is a, c, g, or t
  misc_feature (276)..(276): n is a, c, g, or t
  misc_feature (282)..(282): n is a, c, g, or t
  misc_feature (285)..(285): n is a, c, g, or t
  misc_feature (291)..(291): n is a, c, g, or t
  misc_feature (294)..(294): n is a, c, g, or t
  misc_feature (303)..(303): n is a, c, g, or t
  misc_feature (306)..(306): n is a, c, g, or t
  misc_feature (312)..(312): n is a, c, g, or t
  misc_feature (315)..(315): n is a, c, g, or t
  misc_feature (324)..(324): n is a, c, g, or t
  misc_feature (327)..(327): n is a, c, g, or t
  misc_feature (333)..(333): n is a, c, g, or t
  misc_feature (339)..(339): n is a, c, g, or t
  misc_feature (342)..(342): n is a, c, g, or t
  misc_feature (345)..(345): n is a, c, g, or t
  misc_feature (348)..(348): n is a, c, g, or t
ggnathwsnwsnwsnaargcngargcnwsngcngcnaaygcngayacnwsngcnggngaygcnytngarwsngcnmgncargcngcngarwsngcngcngcngcnaarcarwsngargaygcnwsnwsnwsnwsngcnwsngcngcngcncaraargcnwsngarwsnwsncarwsngcngcngargcngarytnwsnmgnaaracngcngarwsngcngcnggnaaygcngcnmgngaygcnacnacngcnacngaraargcnmgngarwsngcngarwsngcncarwsngcngarcarwsnmgnathgcngcngargargcngtnaaymgnathccnacngtngtn

SEQ ID NO: 861 - DNA, 348 bp, Artificial Sequence
  PCoil-CNA23
  misc_feature (3)..(3): n is a, c, g, or t
  misc_feature (9)..(9): n is a, c, g, or t
  misc_feature (12)..(12): n is a, c, g, or t
  misc_feature (15)..(15): n is a, c, g, or t
  misc_feature (21)..(21): n is a, c, g, or t
  misc_feature (27)..(27): n is a, c, g, or t
  misc_feature (30)..(30): n is a, c, g, or t
  misc_feature (33)..(33): n is a, c, g, or t
  misc_feature (36)..(36): n is a, c, g, or t
  misc_feature (42)..(42): n is a, c, g, or t
  misc_feature (48)..(48): n is a, c, g, or t
  misc_feature (51)..(51): n is a, c, g, or t
  misc_feature (54)..(54): n is a, c, g, or t
  misc_feature (57)..(57): n is a, c, g, or t
  misc_feature (63)..(63): n is a, c, g, or t
  misc_feature (66)..(66): n is a, c, g, or t
  misc_feature (72)..(72): n is a, c, g, or t
  misc_feature (75)..(75): n is a, c, g, or t
  misc_feature (78)..(78): n is a, c, g, or t
  misc_feature (84)..(84): n is a, c, g, or t
  misc_feature (87)..(87): n is a, c, g, or t
  misc_feature (93)..(93): n is a, c, g, or t
  misc_feature (96)..(96): n is a, c, g, or t
  misc_feature (99)..(99): n is a, c, g, or t
  misc_feature (102)..(102): n is a, c, g, or t
  misc_feature (105)..(105): n is a, c, g, or t
  misc_feature (114)..(114): n is a, c, g, or t
  misc_feature (123)..(123): n is a, c, g, or t
  misc_feature (126)..(126): n is a, c, g, or t
  misc_feature (129)..(129): n is a, c, g, or t
  misc_feature (132)..(132): n is a, c, g, or t
  misc_feature (135)..(135): n is a, c, g, or t
  misc_feature (138)..(138): n is a, c, g, or t
  misc_feature (141)..(141): n is a, c, g, or t
  misc_feature (144)..(144): n is a, c, g, or t
  misc_feature (147)..(147): n is a, c, g, or t
  misc_feature (150)..(150): n is a, c, g, or t
  misc_feature (159)..(159): n is a, c, g, or t
  misc_feature (162)..(162): n is a, c, g, or t
  misc_feature (168)..(168): n is a, c, g, or t
  misc_feature (171)..(171): n is a, c, g, or t
  misc_feature (177)..(177): n is a, c, g, or t
  misc_feature (180)..(180): n is a, c, g, or t
  misc_feature (183)..(183): n is a, c, g, or t
  misc_feature (189)..(189): n is a, c, g, or t
  misc_feature (195)..(195): n is a, c, g, or t
  misc_feature (198)..(198): n is a, c, g, or t
  misc_feature (201)..(201): n is a, c, g, or t
  misc_feature (207)..(207): n is a, c, g, or t
  misc_feature (210)..(210): n is a, c, g, or t
  misc_feature (216)..(216): n is a, c, g, or t
  misc_feature (219)..(219): n is a, c, g, or t
  misc_feature (222)..(222): n is a, c, g, or t
  misc_feature (225)..(225): n is a, c, g, or t
  misc_feature (231)..(231): n is a, c, g, or t
  misc_feature (234)..(234): n is a, c, g, or t
  misc_feature (237)..(237): n is a, c, g, or t
  misc_feature (243)..(243): n is a, c, g, or t
  misc_feature (246)..(246): n is a, c, g, or t
  misc_feature (249)..(249): n is a, c, g, or t
  misc_feature (252)..(252): n is a, c, g, or t
  misc_feature (255)..(255): n is a, c, g, or t
  misc_feature (264)..(264): n is a, c, g, or t
  misc_feature (267)..(267): n is a, c, g, or t
  misc_feature (273)..(273): n is a, c, g, or t
  misc_feature (276)..(276): n is a, c, g, or t
  misc_feature (282)..(282): n is a, c, g, or t
  misc_feature (285)..(285): n is a, c, g, or t
  misc_feature (288)..(288): n is a, c, g, or t
  misc_feature (291)..(291): n is a, c, g, or t
  misc_feature (294)..(294): n is a, c, g, or t
  misc_feature (303)..(303): n is a, c, g, or t
  misc_feature (306)..(306): n is a, c, g, or t
  misc_feature (312)..(312): n is a, c, g, or t
  misc_feature (315)..(315): n is a, c, g, or t
  misc_feature (324)..(324): n is a, c, g, or t
  misc_feature (327)..(327): n is a, c, g, or t
  misc_feature (333)..(333): n is a, c, g, or t
  misc_feature (339)..(339): n is a, c, g, or t
  misc_feature (342)..(342): n is a, c, g, or t
  misc_feature (345)..(345): n is a, c, g, or t
  misc_feature (348)..(348): n is a, c, g, or t
ggnathwsnwsnwsnaargcngargcnwsngcngcnaaygcngayacnwsngcnggngaygcnwsngarwsngcnmgncargcngcngarwsngcngcngcngcnaarcarwsngargargcnwsnwsnwsnwsngcnwsngcngcngcncaraargcnwsngarwsnwsncarwsngcngcngargcngarytnwsnmgnaaracngcngarwsngcngcnggnaaygcngcnmgngaygcnacnacngcnacngaraargcnmgngarwsngcngarwsngcnmgnwsngcngarcarwsnmgnathgcngcngargargcngtnaaymgnathccnacngtngtn

SEQ ID NO: 862 - DNA, 348 bp, Artificial Sequence
  PCoil-CNA24
  misc_feature (3)..(3): n is a, c, g, or t
  misc_feature (9)..(9): n is a, c, g, or t
  misc_feature (12)..(12): n is a, c, g, or t
  misc_feature (15)..(15): n is a, c, g, or t
  misc_feature (21)..(21): n is a, c, g, or t
  misc_feature (27)..(27): n is a, c, g, or t
  misc_feature (30)..(30): n is a, c, g, or t
  misc_feature (33)..(33): n is a, c, g, or t
  misc_feature (36)..(36): n is a, c, g, or t
  misc_feature (42)..(42): n is a, c, g, or t
  misc_feature (48)..(48): n is a, c, g, or t
  misc_feature (51)..(51): n is a, c, g, or t
  misc_feature (54)..(54): n is a, c, g, or t
  misc_feature (63)..(63): n is a, c, g, or t
  misc_feature (66)..(66): n is a, c, g, or t
  misc_feature (72)..(72): n is a, c, g, or t
  misc_feature (75)..(75): n is a, c, g, or t
  misc_feature (78)..(78): n is a, c, g, or t
  misc_feature (84)..(84): n is a, c, g, or t
  misc_feature (87)..(87): n is a, c, g, or t
  misc_feature (93)..(93): n is a, c, g, or t
  misc_feature (96)..(96): n is a, c, g, or t
  misc_feature (99)..(99): n is a, c, g, or t
  misc_feature (102)..(102): n is a, c, g, or t
  misc_feature (105)..(105): n is a, c, g, or t
  misc_feature (114)..(114): n is a, c, g, or t
  misc_feature (123)..(123): n is a, c, g, or t
  misc_feature (126)..(126): n is a, c, g, or t
  misc_feature (129)..(129): n is a, c, g, or t
  misc_feature (132)..(132): n is a, c, g, or t
  misc_feature (135)..(135): n is a, c, g, or t
  misc_feature (138)..(138): n is a, c, g, or t
  misc_feature (141)..(141): n is a, c, g, or t
  misc_feature (144)..(144): n is a, c, g, or t
  misc_feature (147)..(147): n is a, c, g, or t
  misc_feature (150)..(150): n is a, c, g, or t
  misc_feature (159)..(159): n is a, c, g, or t
  misc_feature (162)..(162): n is a, c, g, or t
  misc_feature (168)..(168): n is a, c, g, or t
  misc_feature (171)..(171): n is a, c, g, or t
  misc_feature (177)..(177): n is a, c, g, or t
  misc_feature (180)..(180): n is a, c, g, or t
  misc_feature (183)..(183): n is a, c, g, or t
  misc_feature (189)..(189): n is a, c, g, or t
  misc_feature (195)..(195): n is a, c, g, or t
  misc_feature (198)..(198): n is a, c, g, or t
  misc_feature (201)..(201): n is a, c, g, or t
  misc_feature (207)..(207): n is a, c, g, or t
  misc_feature (210)..(210): n is a, c, g, or t
  misc_feature (216)..(216): n is a, c, g, or t
  misc_feature (219)..(219): n is a, c, g, or t
  misc_feature (222)..(222): n is a, c, g, or t
  misc_feature (225)..(225): n is a, c, g, or t
  misc_feature (231)..(231): n is a, c, g, or t
  misc_feature (234)..(234): n is a, c, g, or t
  misc_feature (237)..(237): n is a, c, g, or t
  misc_feature (243)..(243): n is a, c, g, or t
  misc_feature (246)..(246): n is a, c, g, or t
  misc_feature (249)..(249): n is a, c, g, or t
  misc_feature (252)..(252): n is a, c, g, or t
  misc_feature (255)..(255): n is a, c, g, or t
  misc_feature (264)..(264): n is a, c, g, or t
  misc_feature (267)..(267): n is a, c, g, or t
  misc_feature (273)..(273): n is a, c, g, or t
  misc_feature (276)..(276): n is a, c, g, or t
  misc_feature (282)..(282): n is a, c, g, or t
  misc_feature (285)..(285): n is a, c, g, or t
  misc_feature (291)..(291): n is a, c, g, or t
  misc_feature (294)..(294): n is a, c, g, or t
  misc_feature (303)..(303): n is a, c, g, or t
  misc_feature (306)..(306): n is a, c, g, or t
  misc_feature (312)..(312): n is a, c, g, or t
  misc_feature (315)..(315): n is a, c, g, or t
  misc_feature (324)..(324): n is a, c, g, or t
  misc_feature (327)..(327): n is a, c, g, or t
  misc_feature (333)..(333): n is a, c, g, or t
  misc_feature (339)..(339): n is a, c, g, or t
  misc_feature (342)..(342): n is a, c, g, or t
  misc_feature (345)..(345): n is a, c, g, or t
  misc_feature (348)..(348): n is a, c, g, or t
ggnathwsngcnwsnaargcngargcnwsngcngcnaaygcngayacnwsngcngargaygcnwsngarwsngcnmgncargcngcngarwsngcngcngcngcnaarcarwsngargargcnwsnwsnwsnwsngcnwsngcngcngcncaraargcnwsngarwsnytncarwsngcngcngargcngarytnwsnmgnaaracngcngarwsngcngcnggnaaygcngcnmgngaygcnacnacngcnacngaraargcnmgngarwsngcngarwsngcncarwsngcngarcarwsnmgnathgcngcngargargcngtnaaymgnathccnacngtngtn

SEQ ID NO: 863 - DNA, 348 bp, Artificial Sequence
  PCoil-CNA25
  misc_feature (3)..(3): n is a, c, g, or t
  misc_feature (9)..(9): n is a, c, g, or t
  misc_feature (12)..(12): n is a, c, g, or t
  misc_feature (15)..(15): n is a, c, g, or t
  misc_feature (21)..(21): n is a, c, g, or t
  misc_feature (27)..(27): n is a, c, g, or t
  misc_feature (30)..(30): n is a, c, g, or t
  misc_feature (33)..(33): n is a, c, g, or t
  misc_feature (36)..(36): n is a, c, g, or t
  misc_feature (42)..(42): n is a, c, g, or t
  misc_feature (48)..(48): n is a, c, g, or t
  misc_feature (51)..(51): n is a, c, g, or t
  misc_feature (54)..(54): n is a, c, g, or t
  misc_feature (57)..(57): n is a, c, g, or t
  misc_feature (63)..(63): n is a, c, g, or t
  misc_feature (66)..(66): n is a, c, g, or t
  misc_feature (72)..(72): n is a, c, g, or t
  misc_feature (75)..(75): n is a, c, g, or t
  misc_feature (78)..(78): n is a, c, g, or t
  misc_feature (84)..(84): n is a, c, g, or t
  misc_feature (87)..(87): n is a, c, g, or t
  misc_feature (93)..(93): n is a, c, g, or t
  misc_feature (96)..(96): n is a, c, g, or t
  misc_feature (99)..(99): n is a, c, g, or t
  misc_feature (102)..(102): n is a, c, g, or t
  misc_feature (105)..(105): n is a, c, g, or t
  misc_feature (114)..(114): n is a, c, g, or t
  misc_feature (123)..(123): n is a, c, g, or t
  misc_feature (126)..(126): n is a, c, g, or t
  misc_feature (129)..(129): n is a, c, g, or t
  misc_feature (132)..(132): n is a, c, g, or t
  misc_feature (135)..(135): n is a, c, g, or t
  misc_feature (138)..(138): n is a, c, g, or t
  misc_feature (141)..(141): n is a, c, g, or t
  misc_feature (144)..(144): n is a, c, g, or t
  misc_feature (147)..(147): n is a, c, g, or t
  misc_feature (150)..(150): n is a, c, g, or t
  misc_feature (159)..(159): n is a, c, g, or t
  misc_feature (162)..(162): n is a, c, g, or t
  misc_feature (168)..(168): n is a, c, g, or t
  misc_feature (171)..(171): n is a, c, g, or t
  misc_feature (177)..(177): n is a, c, g, or t
  misc_feature (180)..(180): n is a, c, g, or t
  misc_feature (183)..(183): n is a, c, g, or t
  misc_feature (189)..(189): n is a, c, g, or t
  misc_feature (195)..(195): n is a, c, g, or t
  misc_feature (198)..(198): n is a, c, g, or t
  misc_feature (201)..(201): n is a, c, g, or t
  misc_feature (207)..(207): n is a, c, g, or t
  misc_feature (210)..(210): n is a, c, g, or t
  misc_feature (216)..(216): n is a, c, g, or t
  misc_feature (219)..(219): n is a, c, g, or t
  misc_feature (222)..(222): n is a, c, g, or t
  misc_feature (225)..(225): n is a, c, g, or t
  misc_feature (231)..(231): n is a, c, g, or t
  misc_feature (234)..(234): n is a, c, g, or t
  misc_feature (237)..(237): n is a, c, g, or t
  misc_feature (243)..(243): n is a, c, g, or t
  misc_feature (246)..(246): n is a, c, g, or t
  misc_feature (249)..(249): n is a, c, g, or t
  misc_feature (252)..(252): n is a, c, g, or t
  misc_feature (255)..(255): n is a, c, g, or t
  misc_feature (264)..(264): n is a, c, g, or t
  misc_feature (267)..(267): n is a, c, g, or t
  misc_feature (273)..(273): n is a, c, g, or t
  misc_feature (276)..(276): n is a, c, g, or t
  misc_feature (282)..(282): n is a, c, g, or t
  misc_feature (285)..(285): n is a, c, g, or t
  misc_feature (291)..(291): n is a, c, g, or t
  misc_feature (294)..(294): n is a, c, g, or t
  misc_feature (303)..(303): n is a, c, g, or t
  misc_feature (306)..(306): n is a, c, g, or t
  misc_feature (312)..(312): n is a, c, g, or t
  misc_feature (315)..(315): n is a, c, g, or t
  misc_feature (324)..(324): n is a, c, g, or t
  misc_feature (327)..(327): n is a, c, g, or t
  misc_feature (333)..(333): n is a, c, g, or t
  misc_feature (339)..(339): n is a, c, g, or t
  misc_feature (342)..(342): n is a, c, g, or t
  misc_feature (345)..(345): n is a, c, g, or t
  misc_feature (348)..(348): n is a, c, g, or t
ggnathwsngcnwsnaargcngargcnwsngcngcnaaygcngayacnwsngcnggngargcnwsngarwsngcnmgncargcnacngarwsngcngcnwsngcnaarcarwsngargargcnwsnwsnwsnwsngcnwsngcngcngcncaraargcnwsngarwsnwsncarwsngcngcngaygcngarytnwsnmgnaaracngcngarwsngcngcnggnaaygcngcnmgngaygcnacnacngcnacngaraargcnmgngarwsngcngarwsngcncarwsngcngarcarwsnmgnathgcngcngargargcngtnaaymgnathccnacngtngtn

SEQ ID NO: 864 - DNA, 348 bp, Artificial Sequence
  PCoil-CNA26
  misc_feature (3)..(3): n is a, c, g, or t
  misc_feature (9)..(9): n is a, c, g, or t
  misc_feature (12)..(12): n is a, c, g, or t
  misc_feature (15)..(15): n is a, c, g, or t
  misc_feature (21)..(21): n is a, c, g, or t
  misc_feature (30)..(30): n is a, c, g, or t
  misc_feature (33)..(33): n is a, c, g, or t
  misc_feature (36)..(36): n is a, c, g, or t
  misc_feature (42)..(42): n is a, c, g, or t
  misc_feature (48)..(48): n is a, c, g, or t
  misc_feature (51)..(51): n is a, c, g, or t
  misc_feature (54)..(54): n is a, c, g, or t
  misc_feature (57)..(57): n is a, c, g, or t
  misc_feature (63)..(63): n is a, c, g, or t
  misc_feature (66)..(66): n is a, c, g, or t
  misc_feature (72)..(72): n is a, c, g, or t
  misc_feature (75)..(75): n is a, c, g, or t
  misc_feature (78)..(78): n is a, c, g, or t
  misc_feature (84)..(84): n is a, c, g, or t
  misc_feature (87)..(87): n is a, c, g, or t
  misc_feature (93)..(93): n is a, c, g, or t
  misc_feature (96)..(96): n is a, c, g, or t
  misc_feature (99)..(99): n is a, c, g, or t
  misc_feature (102)..(102): n is a, c, g, or t
  misc_feature (105)..(105): n is a, c, g, or t
  misc_feature (114)..(114): n is a, c, g, or t
  misc_feature (123)..(123): n is a, c, g, or t
  misc_feature (126)..(126): n is a, c, g, or t
  misc_feature (129)..(129): n is a, c, g, or t
  misc_feature (132)..(132): n is a, c, g, or t
  misc_feature (135)..(135): n is a, c, g, or t
  misc_feature (138)..(138): n is a, c, g, or t
  misc_feature (141)..(141): n is a, c, g, or t
  misc_feature (144)..(144): n is a, c, g, or t
  misc_feature (147)..(147): n is a, c, g, or t
  misc_feature (150)..(150): n is a, c, g, or t
  misc_feature (159)..(159): n is a, c, g, or t
  misc_feature (162)..(162): n is a, c, g, or t
  misc_feature (168)..(168): n is a, c, g, or t
  misc_feature (171)..(171): n is a, c, g, or t
  misc_feature (177)..(177): n is a, c, g, or t
  misc_feature (180)..(180): n is a, c, g, or t
  misc_feature (183)..(183): n is a, c, g, or t
  misc_feature (189)..(189): n is a, c, g, or t
  misc_feature (195)..(195): n is a, c, g, or t
  misc_feature (198)..(198): n is a, c, g, or t
  misc_feature (201)..(201): n is a, c, g, or t
  misc_feature (207)..(207): n is a, c, g, or t
  misc_feature (210)..(210): n is a, c, g, or t
  misc_feature (216)..(216): n is a, c, g, or t
  misc_feature (219)..(219): n is a, c, g, or t
  misc_feature (222)..(222): n is a, c, g, or t
  misc_feature (225)..(225): n is a, c, g, or t
  misc_feature (231)..(231): n is a, c, g, or t
  misc_feature (234)..(234): n is a, c, g, or t
  misc_feature (237)..(237): n is a, c, g, or t
  misc_feature (243)..(243): n is a, c, g, or t
  misc_feature (246)..(246): n is a, c, g, or t
  misc_feature (249)..(249): n is a, c, g, or t
  misc_feature (252)..(252): n is a, c, g, or t
  misc_feature (255)..(255): n is a, c, g, or t
  misc_feature (264)..(264): n is a, c, g, or t
  misc_feature (267)..(267): n is a, c, g, or t
  misc_feature (273)..(273): n is a, c, g, or t
  misc_feature (276)..(276): n is a, c, g, or t
  misc_feature (282)..(282): n is a, c, g, or t
  misc_feature (285)..(285): n is a, c, g, or t
  misc_feature (291)..(291): n is a, c, g, or t
  misc_feature (294)..(294): n is a, c, g, or t
  misc_feature (303)..(303): n is a, c, g, or t
  misc_feature (306)..(306): n is a, c, g, or t
  misc_feature (312)..(312): n is a, c, g, or t
  misc_feature (315)..(315): n is a, c, g, or t
  misc_feature (324)..(324): n is a, c, g, or t
  misc_feature (327)..(327): n is a, c, g, or t
  misc_feature (333)..(333): n is a, c, g, or t
  misc_feature (339)..(339): n is a, c, g, or t
  misc_feature (342)..(342): n is a, c, g, or t
  misc_feature (345)..(345): n is a, c, g, or t
  misc_feature (348)..(348): n is a, c, g, or t
ggnathwsngcnwsncargcngargarwsngcngcnaaygcngayacnwsngcnggngargcnwsngarwsngcnmgncargcngcngarwsngcngcnwsngcnaarcarwsngargargcnwsnwsnwsnwsngcnwsngcngcngcncaraargcnwsngarwsnwsncarwsngcngcngargcngarytnwsnmgnaaracngcngarwsngcngcnggnaaygcngcnmgngaygcnacnacngcnacngaraargcnmgngarwsngcngarwsngcncarwsngcngarcarwsnmgnathgcngcngargargcngtnaaymgnathccnacngtngtn

SEQ ID NO: 865 - DNA, 348 bp, Artificial Sequence
  PCoil-CNA27
  misc_feature (3)..(3): n is a, c, g, or t
  misc_feature (9)..(9): n is a, c, g, or t
  misc_feature (12)..(12): n is a, c, g, or t
  misc_feature (15)..(15): n is a, c, g, or t
  misc_feature (21)..(21): n is a, c, g, or t
  misc_feature (30)..(30): n is a, c, g, or t
  misc_feature (33)..(33): n is a, c, g, or t
  misc_feature (36)..(36): n is a, c, g, or t
  misc_feature (42)..(42): n is a, c, g, or t
  misc_feature (48)..(48): n is a, c, g, or t
  misc_feature (51)..(51): n is a, c, g, or t
  misc_feature (54)..(54): n is a, c, g, or t
  misc_feature (57)..(57): n is a, c, g, or t
  misc_feature (63)..(63): n is a, c, g, or t
  misc_feature (66)..(66): n is a, c, g, or t
  misc_feature (72)..(72): n is a, c, g, or t
  misc_feature (75)..(75): n is a, c, g, or t
  misc_feature (78)..(78): n is a, c, g, or t
  misc_feature (84)..(84): n is a, c, g, or t
  misc_feature (87)..(87): n is a, c, g, or t
  misc_feature (93)..(93): n is a, c, g, or t
  misc_feature (96)..(96): n is a, c, g, or t
  misc_feature (99)..(99): n is a, c, g, or t
  misc_feature (102)..(102): n is a, c, g, or t
  misc_feature (105)..(105): n is a, c, g, or t
  misc_feature (114)..(114): n is a, c, g, or t
  misc_feature (123)..(123): n is a, c, g, or t
  misc_feature (126)..(126): n is a, c, g, or t
  misc_feature (129)..(129): n is a, c, g, or t
  misc_feature (132)..(132): n is a, c, g, or t
  misc_feature (135)..(135): n is a, c, g, or t
  misc_feature (138)..(138): n is a, c, g, or t
  misc_feature (141)..(141): n is a, c, g, or t
  misc_feature (144)..(144): n is a, c, g, or t
  misc_feature (147)..(147): n is a, c, g, or t
  misc_feature (150)..(150): n is a, c, g, or t
  misc_feature (159)..(159): n is a, c, g, or t
  misc_feature (162)..(162): n is a, c, g, or t
  misc_feature (168)..(168): n is a, c, g, or t
  misc_feature (171)..(171): n is a, c, g, or t
  misc_feature (177)..(177): n is a, c, g, or t
  misc_feature (180)..(180): n is a, c, g, or t
  misc_feature (183)..(183): n is a, c, g, or t
  misc_feature (189)..(189): n is a, c, g, or t
  misc_feature (195)..(195): n is a, c, g, or t
  misc_feature (198)..(198): n is a, c, g, or t
  misc_feature (201)..(201): n is a, c, g, or t
  misc_feature (207)..(207): n is a, c, g, or t
  misc_feature (210)..(210): n is a, c, g, or t
  misc_feature (216)..(216): n is a, c, g, or t
  misc_feature (219)..(219): n is a, c, g, or t
  misc_feature (222)..(222): n is a, c, g, or t
  misc_feature (225)..(225): n is a, c, g, or t
  misc_feature (231)..(231): n is a, c, g, or t
  misc_feature (234)..(234): n is a, c, g, or t
  misc_feature (237)..(237): n is a, c, g, or t
  misc_feature (243)..(243): n is a, c, g, or t
  misc_feature (246)..(246): n is a, c, g, or t
  misc_feature (249)..(249): n is a, c, g, or t
  misc_feature (252)..(252): n is a, c, g, or t
  misc_feature (255)..(255): n is a, c, g, or t
  misc_feature (264)..(264): n is a, c, g, or t
  misc_feature (267)..(267): n is a, c, g, or t
  misc_feature (273)..(273): n is a, c, g, or t
  misc_feature (276)..(276): n is a, c, g, or t
  misc_feature (282)..(282): n is a, c, g, or t
  misc_feature (285)..(285): n is a, c, g, or t
  misc_feature (291)..(291): n is a, c, g, or t
  misc_feature (294)..(294): n is a, c, g, or t
  misc_feature (303)..(303): n is a, c, g, or t
  misc_feature (306)..(306): n is a, c, g, or t
  misc_feature (312)..(312): n is a, c, g, or t
  misc_feature (315)..(315): n is a, c, g, or t
  misc_feature (324)..(324): n is a, c, g, or t
  misc_feature (327)..(327): n is a, c, g, or t
  misc_feature (333)..(333): n is a, c, g, or t
  misc_feature (339)..(339): n is a, c, g, or t
  misc_feature (342)..(342): n is a, c, g, or t
  misc_feature (345)..(345): n is a, c, g, or t
  misc_feature (348)..(348): n is a, c, g, or t
ggnathwsngcnwsncargcngargarwsngcngcnaaygcngayacnwsngcnggngaygcnwsngarwsngcnmgncargcngtngarwsngcngcnwsngcnaarcarwsngargargcnwsnwsnwsnwsngcnwsngcngcngcncaraargcnwsngarwsnwsncarwsngcngcngargcngarytnwsnmgnaaracngcngarwsngcngcnggnaaygcngcnmgngaygcnacnacngcnacngaraargcnmgngarwsngcngarwsngcncarwsngcngarcarwsnmgnathgcngcngargargcngtnaaymgnathccnacngtngtn

SEQ ID NO: 866 - DNA, 348 bp, Artificial Sequence
  PCoil-CNA28
  misc_feature (3)..(3): n is a, c, g, or t
  misc_feature (9)..(9): n is a, c, g, or t
  misc_feature (12)..(12): n is a, c, g, or t
  misc_feature (15)..(15): n is a, c, g, or t
  misc_feature (21)..(21): n is a, c, g, or t
  misc_feature (30)..(30): n is a, c, g, or t
  misc_feature (33)..(33): n is a, c, g, or t
  misc_feature (36)..(36): n is a, c, g, or t
  misc_feature (42)..(42): n is a, c, g, or t
  misc_feature (48)..(48): n is a, c, g, or t
  misc_feature (51)..(51): n is a, c, g, or t
  misc_feature (54)..(54): n is a, c, g, or t
  misc_feature (57)..(57): n is a, c, g, or t
  misc_feature (63)..(63): n is a, c, g, or t
  misc_feature (66)..(66): n is a, c, g, or t
  misc_feature (72)..(72): n is a, c, g, or t
  misc_feature (75)..(75): n is a, c, g, or t
  misc_feature (78)..(78): n is a, c, g, or t
  misc_feature (84)..(84): n is a, c, g, or t
  misc_feature (87)..(87): n is a, c, g, or t
  misc_feature (93)..(93): n is a, c, g, or t
  misc_feature (96)..(96): n is a, c, g, or t
  misc_feature (99)..(99): n is a, c, g, or t
  misc_feature (102)..(102): n is a, c, g, or t
  misc_feature (105)..(105): n is a, c, g, or t
  misc_feature (114)..(114): n is a, c, g, or t
  misc_feature (123)..(123): n is a, c, g, or t
  misc_feature (126)..(126): n is a, c, g, or t
  misc_feature (129)..(129): n is a, c, g, or t
  misc_feature (132)..(132): n is a, c, g, or t
  misc_feature (135)..(135): n is a, c, g, or t
  misc_feature (138)..(138): n is a, c, g, or t
  misc_feature (141)..(141): n is a, c, g, or t
  misc_feature (144)..(144): n is a, c, g, or t
  misc_feature (147)..(147): n is a, c, g, or t
  misc_feature (150)..(150): n is a, c, g, or t
  misc_feature (159)..(159): n is a, c, g, or t
  misc_feature (162)..(162): n is a, c, g, or t
  misc_feature (168)..(168): n is a, c, g, or t
  misc_feature (171)..(171): n is a, c, g, or t
  misc_feature (177)..(177): n is a, c, g, or t
  misc_feature (180)..(180): n is a, c, g, or t
  misc_feature (183)..(183): n is a, c, g, or t
  misc_feature (189)..(189): n is a, c, g, or t
  misc_feature (195)..(195): n is a, c, g, or t
  misc_feature (198)..(198): n is a, c, g, or t
  misc_feature (201)..(201): n is a, c, g, or t
  misc_feature (207)..(207): n is a, c, g, or t
  misc_feature (210)..(210): n is a, c, g, or t
  misc_feature (216)..(216): n is a, c, g, or t
  misc_feature (219)..(219): n is a, c, g, or t
  misc_feature (222)..(222): n is a, c, g, or t
  misc_feature (225)..(225): n is a, c, g, or t
  misc_feature (231)..(231): n is a, c, g, or t
  misc_feature (234)..(234): n is a, c, g, or t
  misc_feature (237)..(237): n is a, c, g, or t
  misc_feature (243)..(243): n is a, c, g, or t
  misc_feature (246)..(246): n is a, c, g, or t
  misc_feature (249)..(249): n is a, c, g, or t
  misc_feature (252)..(252): n is a, c, g, or t
  misc_feature (255)..(255): n is a, c, g, or t
  misc_feature (264)..(264): n is a, c, g, or t
  misc_feature (267)..(267): n is a, c, g, or t
  misc_feature (273)..(273): n is a, c, g, or t
  misc_feature (276)..(276): n is a, c, g, or t
  misc_feature (282)..(282): n is a, c, g, or t
  misc_feature (285)..(285): n is a, c, g, or t
  misc_feature (291)..(291): n is a, c, g, or t
  misc_feature (294)..(294): n is a, c, g, or t
  misc_feature (303)..(303): n is a, c, g, or t
  misc_feature (306)..(306): n is a, c, g, or t
  misc_feature (312)..(312): n is a, c, g, or t
  misc_feature (315)..(315): n is a, c, g, or t
  misc_feature (324)..(324): n is a, c, g, or t
  misc_feature (327)..(327): n is a, c, g, or t
  misc_feature (333)..(333): n is a, c, g, or t
  misc_feature (339)..(339): n is a, c, g, or t
  misc_feature (342)..(342): n is a, c, g, or t
  misc_feature (345)..(345): n is a, c, g, or t
  misc_feature (348)..(348): n is a, c, g, or t
ggnathwsngcnwsncargcngargarwsngcngcnaaygcngayacnwsngcnggngargcnwsngarwsngcnmgncargcngcngarwsngcngcnwsngcnaarcarwsngargaygcnwsnwsnwsnwsngcnwsngcngcngcncaraargcnwsngarwsnwsncarwsngcngcngargcngarytnwsnmgnaaracngcngarwsngcngcnggnaaygcngcnmgngaygcnacnacngcnacngaraargcnmgngarwsngcngarwsngcncarwsngcngarcarwsnmgnathgcngcngargargcngtnaaymgnathccnacngtngtn

SEQ ID NO: 867 - DNA, 348 bp, Artificial Sequence
  PCoil-CNA29
  misc_feature (3)..(3): n is a, c, g, or t
  misc_feature (9)..(9): n is a, c, g, or t
  misc_feature (12)..(12): n is a, c, g, or t
  misc_feature (15)..(15): n is a, c, g, or t
  misc_feature (21)..(21): n is a, c, g, or t
  misc_feature (30)..(30): n is a, c, g, or t
  misc_feature (33)..(33): n is a, c, g, or t
  misc_feature (36)..(36): n is a, c, g, or t
  misc_feature (42)..(42): n is a, c, g, or t
  misc_feature (48)..(48): n is a, c, g, or t
  misc_feature (51)..(51): n is a, c, g, or t
  misc_feature (54)..(54): n is a, c, g, or t
  misc_feature (57)..(57): n is a, c, g, or t
  misc_feature (63)..(63): n is a, c, g, or t
  misc_feature (66)..(66): n is a, c, g, or t
  misc_feature (72)..(72): n is a, c, g, or t
  misc_feature (75)..(75): n is a, c, g, or t
  misc_feature (78)..(78): n is a, c, g, or t
  misc_feature (84)..(84): n is a, c, g, or t
  misc_feature (87)..(87): n is a, c, g, or t
  misc_feature (93)..(93): n is a, c, g, or t
  misc_feature (96)..(96): n is a, c, g, or t
  misc_feature (99)..(99): n is a, c, g, or t
  misc_feature (102)..(102): n is a, c, g, or t
  misc_feature (105)..(105): n is a, c, g, or t
  misc_feature (114)..(114): n is a, c, g, or t
  misc_feature (123)..(123): n is a, c, g, or t
  misc_feature (126)..(126): n is a, c, g, or t
  misc_feature (129)..(129): n is a, c, g, or t
  misc_feature (132)..(132): n is a, c, g, or t
  misc_feature (135)..(135): n is a, c, g, or t
  misc_feature (138)..(138): n is a, c, g, or t
  misc_feature (141)..(141): n is a, c, g, or t
  misc_feature (144)..(144): n is a, c, g, or t
  misc_feature (147)..(147): n is a, c, g, or t
  misc_feature (150)..(150): n is a, c, g, or t
  misc_feature (159)..(159): n is a, c, g, or t
  misc_feature (162)..(162): n is a, c, g, or t
  misc_feature (168)..(168): n is a, c, g, or t
  misc_feature (171)..(171): n is a, c, g, or t
  misc_feature (177)..(177): n is a, c, g, or t
  misc_feature (180)..(180): n is a, c, g, or t
  misc_feature (183)..(183): n is a, c, g, or t
  misc_feature (189)..(189): n is a, c, g, or t
  misc_feature (195)..(195): n is a, c, g, or t
  misc_feature (198)..(198): n is a, c, g, or t
  misc_feature (201)..(201): n is a, c, g, or t
  misc_feature (207)..(207): n is a, c, g, or t
  misc_feature (210)..(210): n is a, c, g, or t
  misc_feature (216)..(216): n is a, c, g, or t
  misc_feature (219)..(219): n is a, c, g, or t
  misc_feature (222)..(222): n is a, c, g, or t
  misc_feature (225)..(225): n is a, c, g, or t
  misc_feature (231)..(231): n is a, c, g, or t
  misc_feature (234)..(234): n is a, c, g, or t
  misc_feature (237)..(237): n is a, c, g, or t
  misc_feature (243)..(243): n is a, c, g, or t
  misc_feature (246)..(246): n is a, c, g, or t
  misc_feature (249)..(249): n is a, c, g, or t
  misc_feature (252)..(252): n is a, c, g, or t
  misc_feature (255)..(255): n is a, c, g, or t
  misc_feature (264)..(264): n is a, c, g, or t
  misc_feature (267)..(267): n is a, c, g, or t
  misc_feature (273)..(273): n is a, c, g, or t
  misc_feature (276)..(276): n is a, c, g, or t
  misc_feature (282)..(282): n is a, c, g, or t
  misc_feature (285)..(285): n is a, c, g, or t
  misc_feature (291)..(291): n is a, c, g, or t
  misc_feature (294)..(294): n is a, c, g, or t
  misc_feature (303)..(303): n is a, c, g, or t
  misc_feature (306)..(306): n is a, c, g, or t
  misc_feature (312)..(312): n is a, c, g, or t
  misc_feature (315)..(315): n is a, c, g, or t
  misc_feature (324)..(324): n is a, c, g, or t
  misc_feature (327)..(327): n is a, c, g, or t
  misc_feature (333)..(333): n is a, c, g, or t
  misc_feature (339)..(339): n is a, c, g, or t
  misc_feature (342)..(342): n is a, c, g, or t
  misc_feature (345)..(345): n is a, c, g, or t
  misc_feature (348)..(348): n is a, c, g, or t
ggnathwsngcnwsncargcngargarwsngcngcnaaygtngayacnwsngcnggngargcnwsngarwsngcnmgncargcngcngarwsngcngcnwsngcnaarcarwsngargaygcnwsnwsnwsnwsngcnwsngcngcngcncaraargcnwsngarwsnwsncarwsngcngcngargcngarytnwsnmgnaaracngcngarwsngcngcnggnaaygcngcnmgngaygcnacnacngcnacngaraargcnmgngarwsngcngarwsngcncarwsngcngarcarwsnmgnathgcngcngargargcngtnaaymgnathccnacngtngtn

SEQ ID NO: 868 - DNA, 348 bp, Artificial Sequence
  PCoil-CNA30
  misc_feature (3)..(3): n is a, c, g, or t
  misc_feature (9)..(9): n is a, c, g, or t
  misc_feature (12)..(12): n is a, c, g, or t
  misc_feature (15)..(15): n is a, c, g, or t
  misc_feature (21)..(21): n is a, c, g, or t
  misc_feature (27)..(27): n is a, c, g, or t
  misc_feature (30)..(30): n is a, c, g, or t
  misc_feature (33)..(33): n is a, c, g, or t
  misc_feature (36)..(36): n is a, c, g, or t
  misc_feature (42)..(42): n is a, c, g, or t
  misc_feature (48)..(48): n is a, c, g, or t
  misc_feature (51)..(51): n is a, c, g, or t
  misc_feature (54)..(54): n is a, c, g, or t
  misc_feature (57)..(57): n is a, c, g, or t
  misc_feature (63)..(63): n is a, c, g, or t
  misc_feature (66)..(66): n is a, c, g, or t
  misc_feature (72)..(72): n is a, c, g, or t
  misc_feature (75)..(75): n is a, c, g, or t
  misc_feature (78)..(78): n is a, c, g, or t
  misc_feature (84)..(84): n is a, c, g, or t
  misc_feature (87)..(87): n is a, c, g, or t
  misc_feature (93)..(93): n is a, c, g, or t
  misc_feature (96)..(96): n is a, c, g, or t
  misc_feature (99)..(99): n is a, c, g, or t
  misc_feature (102)..(102): n is a, c, g, or t
  misc_feature (105)..(105): n is a, c, g, or t
  misc_feature (114)..(114): n is a, c, g, or t
  misc_feature (123)..(123): n is a, c, g, or t
  misc_feature (126)..(126): n is a, c, g, or t
  misc_feature (129)..(129): n is a, c, g, or t
  misc_feature (132)..(132): n is a, c, g, or t
  misc_feature (135)..(135): n is a, c, g, or t
  misc_feature (138)..(138): n is a, c, g, or t
  misc_feature (141)..(141): n is a, c, g, or t
  misc_feature (144)..(144): n is a, c, g, or t
  misc_feature (147)..(147): n is a, c, g, or t
  misc_feature (150)..(150): n is a, c, g, or t
  misc_feature (159)..(159): n is a, c, g, or t
  misc_feature (162)..(162): n is a, c, g, or t
  misc_feature (168)..(168): n is a, c, g, or t
  misc_feature (171)..(171): n is a, c, g, or t
  misc_feature (177)..(177): n is a, c, g, or t
  misc_feature (180)..(180): n is a, c, g, or t
  misc_feature (183)..(183): n is a, c, g, or t
  misc_feature (189)..(189): n is a, c, g, or t
  misc_feature (195)..(195): n is a, c, g, or t
  misc_feature (198)..(198): n is a, c, g, or t
  misc_feature (201)..(201): n is a, c, g, or t
  misc_feature (207)..(207): n is a, c, g, or t
  misc_feature (210)..(210): n is a, c, g, or t
  misc_feature (216)..(216): n is a, c, g, or t
  misc_feature (219)..(219): n is a, c, g, or t
  misc_feature (222)..(222): n is a, c, g, or t
  misc_feature (225)..(225): n is a, c, g, or t
  misc_feature (231)..(231): n is a, c, g, or t
  misc_feature (234)..(234): n is a, c, g, or t
  misc_feature (237)..(237): n is a, c, g, or t
  misc_feature (243)..(243): n is a, c, g, or t
  misc_feature (246)..(246): n is a, c, g, or t
  misc_feature (249)..(249): n is a, c, g, or t
  misc_feature (252)..(252): n is a, c, g, or t
  misc_feature (255)..(255): n is a, c, g, or t
  misc_feature (264)..(264): n is a, c, g, or t
  misc_feature (267)..(267): n is a, c, g, or t
  misc_feature (273)..(273): n is a, c, g, or t
  misc_feature (276)..(276): n is a, c, g, or t
  misc_feature (282)..(282): n is a, c, g, or t
  misc_feature (285)..(285): n is a, c, g, or t
  misc_feature (291)..(291): n is a, c, g, or t
  misc_feature (294)..(294): n is a, c, g, or t
  misc_feature (303)..(303): n is a, c, g, or t
  misc_feature (306)..(306): n is a, c, g, or t
  misc_feature (312)..(312): n is a, c, g, or t
  misc_feature (315)..(315): n is a, c, g, or t
  misc_feature (324)..(324): n is a, c, g, or t
  misc_feature (327)..(327): n is a, c, g, or t
  misc_feature (333)..(333): n is a, c, g, or t
  misc_feature (339)..(339): n is a, c, g, or t
  misc_feature (342)..(342): n is a, c, g, or t
  misc_feature (345)..(345): n is a, c, g, or t
  misc_feature (348)..(348): n is a, c, g, or t
ggnathwsngtnwsncargcngargcnwsngcngcnaaygcngayacnwsngcnggngargcnwsngarwsngcnmgncargcngcngarwsngcngcnwsngcnaaraarwsngargaygcnwsnwsnwsnwsngcnwsngcngcngcncaraargcnwsngarwsnwsncarwsngcngcngargcngarytnwsnmgnaaracngcngarwsngcngcnggnaaygcngcnmgngaygcnacnacngcnacngaraargcnmgngarwsngcngarwsngcncarwsngcngarcarwsnmgnathgcngcngargargcngtnaaymgnathccnacngtngtn

SEQ ID NO: 869 - DNA, 348 bp, Artificial Sequence
  PCoil-CNA31
  misc_feature (3)..(3): n is a, c, g, or t
  misc_feature (9)..(9): n is a, c, g, or t
  misc_feature (12)..(12): n is a, c, g, or t
  misc_feature (15)..(15): n is a, c, g, or t
  misc_feature (21)..(21): n is a, c, g, or t
  misc_feature (30)..(30): n is a, c, g, or t
  misc_feature (33)..(33): n is a, c, g, or t
  misc_feature (36)..(36): n is a, c, g, or t
  misc_feature (42)..(42): n is a, c, g, or t
  misc_feature (48)..(48): n is a, c, g, or t
  misc_feature (51)..(51): n is a, c, g, or t
  misc_feature (54)..(54): n is a, c, g, or t
  misc_feature (57)..(57): n is a, c, g, or t
  misc_feature (63)..(63): n is a, c, g, or t
  misc_feature (66)..(66): n is a, c, g, or t
  misc_feature (72)..(72): n is a, c, g, or t
  misc_feature (75)..(75): n is a, c, g, or t
  misc_feature (78)..(78): n is a, c, g, or t
  misc_feature (84)..(84): n is a, c, g, or t
  misc_feature (87)..(87): n is a, c, g, or t
  misc_feature (93)..(93): n is a, c, g, or t
  misc_feature (96)..(96): n is a, c, g, or t
  misc_feature (99)..(99): n is a, c, g, or t
  misc_feature (102)..(102): n is a, c, g, or t
  misc_feature (105)..(105): n is a, c, g, or t
  misc_feature (114)..(114): n is a, c, g, or t
  misc_feature (123)..(123): n is a, c, g, or t
  misc_feature (126)..(126): n is a, c, g, or t
  misc_feature (129)..(129): n is a, c, g, or t
  misc_feature (132)..(132): n is a, c, g, or t
  misc_feature (135)..(135): n is a, c, g, or t
  misc_feature (138)..(138): n is a, c, g, or t
  misc_feature (141)..(141): n is a, c, g, or t
  misc_feature (144)..(144): n is a, c, g, or t
  misc_feature (147)..(147): n is a, c, g, or t
  misc_feature (150)..(150): n is a, c, g, or t
  misc_feature (159)..(159): n is a, c, g, or t
  misc_feature (162)..(162): n is a, c, g, or t
  misc_feature (168)..(168): n is a, c, g, or t
  misc_feature (171)..(171): n is a, c, g, or t
  misc_feature (177)..(177): n is a, c, g, or t
  misc_feature (180)..(180): n is a, c, g, or t
  misc_feature (183)..(183): n is a, c, g, or t
  misc_feature (189)..(189): n is a, c, g, or t
  misc_feature (195)..(195): n is a, c, g, or t
  misc_feature (198)..(198): n is a, c, g, or t
  misc_feature (201)..(201): n is a, c, g, or t
  misc_feature (207)..(207): n is a, c, g, or t
  misc_feature (210)..(210): n is a, c, g, or t
  misc_feature (216)..(216): n is a, c, g, or t
  misc_feature (219)..(219): n is a, c, g, or t
  misc_feature (222)..(222): n is a, c, g, or t
  misc_feature (225)..(225): n is a, c, g, or t
  misc_feature (231)..(231): n is a, c, g, or t
  misc_feature (234)..(234): n is a, c, g, or t
  misc_feature (237)..(237): n is a, c, g, or t
  misc_feature (243)..(243): n is a, c, g, or t
  misc_feature (246)..(246): n is a, c, g, or t
  misc_feature (249)..(249): n is a, c, g, or t
  misc_feature (252)..(252): n is a, c, g, or t
  misc_feature (255)..(255): n is a, c, g, or t
  misc_feature (264)..(264): n is a, c, g, or t
  misc_feature (267)..(267): n is a, c, g, or t
  misc_feature (273)..(273): n is a, c, g, or t
  misc_feature (276)..(276): n is a, c, g, or t
  misc_feature (282)..(282): n is a, c, g, or t
  misc_feature (285)..(285): n is a, c, g, or t
  misc_feature (291)..(291): n is a, c, g, or t
  misc_feature (294)..(294): n is a, c, g, or t
  misc_feature (303)..(303): n is a, c, g, or t
  misc_feature (306)..(306): n is a, c, g, or t
  misc_feature (312)..(312): n is a, c, g, or t
  misc_feature (315)..(315): n is a, c, g, or t
  misc_feature (324)..(324): n is a, c, g, or t
  misc_feature (327)..(327): n is a, c, g, or t
  misc_feature (333)..(333): n is a, c, g, or t
  misc_feature (339)..(339): n is a, c, g, or t
  misc_feature (342)..(342): n is a, c, g, or t
  misc_feature (345)..(345): n is a, c, g, or t
  misc_feature (348)..(348): n is a, c, g, or t
ggnathwsngcnwsncargcngargarwsngcngcnaaygcngayacnwsngcnggngargcnwsngarwsngcnmgncargcngcngarwsngcngcnwsngcnaarcarwsngargaygcnwsnwsnwsnwsngcnwsngcngcngcncaraargcnwsngarwsnwsncarwsngcngcngaygcngarytnwsnmgnaaracngcngarwsngcngcnggnaaygcngcnmgngaygcnacnacngcngcngaraargcnmgngarwsngcngarwsngcncarwsngcngarcarwsnmgnathgcngcngargaygcngtnaaymgnathccnacngtngtn

SEQ ID NO: 870 - DNA, 348 bp, Artificial Sequence
  PCoil-CNA32
  misc_feature (3)..(3): n is a, c, g, or t
  misc_feature (9)..(9): n is a, c, g, or t
  misc_feature (12)..(12): n is a, c, g, or t
  misc_feature (15)..(15): n is a, c, g, or t
  misc_feature (21)..(21): n is a, c, g, or t
  misc_feature (30)..(30): n is a, c, g, or t
  misc_feature (33)..(33): n is a, c, g, or t
  misc_feature (36)..(36): n is a, c, g, or t
  misc_feature (42)..(42): n is a, c, g, or t
  misc_feature (48)..(48): n is a, c, g, or t
  misc_feature (51)..(51): n is a, c, g, or t
  misc_feature (54)..(54): n is a, c, g, or t
  misc_feature (57)..(57): n is a, c, g, or t
  misc_feature (63)..(63): n is a, c, g, or t
  misc_feature (66)..(66): n is a, c, g, or t
  misc_feature (72)..(72): n is a, c, g, or t
  misc_feature (75)..(75): n is a, c, g, or t
  misc_feature (78)..(78): n is a, c, g, or t
  misc_feature (84)..(84): n is a, c, g, or t
  misc_feature (87)..(87): n is a, c, g, or t
  misc_feature (93)..(93): n is a, c, g, or t
  misc_feature (96)..(96): n is a, c, g, or t
  misc_feature (99)..(99): n is a, c, g, or t
  misc_feature (102)..(102): n is a, c, g, or t
  misc_feature (105)..(105): n is a, c, g, or t
  misc_feature (114)..(114): n is a, c, g, or t
  misc_feature (123)..(123): n is a, c, g, or t
  misc_feature (126)..(126): n is a, c, g, or t
  misc_feature (129)..(129): n is a, c, g, or t
  misc_feature (132)..(132): n is a, c, g, or t
  misc_feature (135)..(135): n is a, c, g, or t
  misc_feature (138)..(138): n is a, c, g, or t
  misc_feature (141)..(141): n is a, c, g, or t
  misc_feature (144)..(144): n is a, c, g, or t
  misc_feature (147)..(147): n is a, c, g, or t
  misc_feature (150)..(150): n is a, c, g, or t
  misc_feature (159)..(159): n is a, c, g, or t
  misc_feature (162)..(162): n is a, c, g, or t
  misc_feature (168)..(168): n is a, c, g, or t
  misc_feature (171)..(171): n is a, c, g, or t
  misc_feature (177)..(177): n is a, c, g, or t
  misc_feature (180)..(180): n is a, c, g, or t
  misc_feature (183)..(183): n is a, c, g, or t
  misc_feature (189)..(189): n is a, c, g, or t
  misc_feature (195)..(195): n is a, c, g, or t
  misc_feature (198)..(198): n is a, c, g, or t
  misc_feature (201)..(201): n is a, c, g, or t
  misc_feature (207)..(207): n is a, c, g, or t
  misc_feature (210)..(210): n is a, c, g, or t
  misc_feature (216)..(216): n is a, c, g, or t
  misc_feature (219)..(219): n is a, c, g, or t
  misc_feature (222)..(222): n is a, c, g, or t
  misc_feature (225)..(225): n is a, c, g, or t
  misc_feature (231)..(231): n is a, c, g, or t
  misc_feature (234)..(234): n is a, c, g, or t
  misc_feature (237)..(237): n is a, c, g, or t
  misc_feature (243)..(243): n is a, c, g, or t
  misc_feature (246)..(246): n is a, c, g, or t
  misc_feature (249)..(249): n is a, c, g, or t
  misc_feature (252)..(252): n is a, c, g, or t
  misc_feature (255)..(255): n is a, c, g, or t
  misc_feature (264)..(264): n is a, c, g, or t
  misc_feature (267)..(267): n is a, c, g, or t
  misc_feature (273)..(273): n is a, c, g, or t
  misc_feature (276)..(276): n is a, c, g, or t
  misc_feature (282)..(282): n is a, c, g, or t
  misc_feature (285)..(285): n is a, c, g, or t
  misc_feature (291)..(291): n is a, c, g, or t
  misc_feature (294)..(294): n is a, c, g, or t
  misc_feature (303)..(303): n is a, c, g, or t
  misc_feature (306)..(306): n is a, c, g, or t
  misc_feature (312)..(312): n is a, c, g, or t
  misc_feature (315)..(315): n is a, c, g, or t
  misc_feature (324)..(324): n is a, c, g, or t
  misc_feature (327)..(327): n is a, c, g, or t
  misc_feature (333)..(333): n is a, c, g, or t
  misc_feature (339)..(339): n is a, c, g, or t
  misc_feature (342)..(342): n is a, c, g, or t
  misc_feature (345)..(345): n is a, c, g, or t
  misc_feature (348)..(348): n is a, c, g, or t
ggnathwsngcnwsncargcngargarwsngcngcnaaygcngayacnwsngcnggngargcnwsngarwsngcnmgncargcngcngarwsngcngcnwsngcnaarcarwsngargaygcnwsnwsnwsnwsngcnwsngcngcngcncaraargcnwsngarwsnwsncarwsngcngcngargcngarytnwsnmgnaaracngcngarwsngcngcnggnaaygcngcnmgngaygcnacnacngcnacngaraargcnmgngarwsngcngarwsngcncarwsngcngarcarwsnmgnathgcngcngargaygcngtnaaymgnathccnacngtngtn

SEQ ID NO: 871 - DNA, 348 bp, Artificial Sequence
  PCoil-CNA33
  misc_feature (3)..(3): n is a, c, g, or t
  misc_feature (9)..(9): n is a, c, g, or t
  misc_feature (12)..(12): n is a, c, g, or t
  misc_feature (15)..(15): n is a, c, g, or t
  misc_feature (21)..(21): n is a, c, g, or t
  misc_feature (30)..(30): n is a, c, g, or t
  misc_feature (33)..(33): n is a, c, g, or t
  misc_feature (36)..(36): n is a, c, g, or t
  misc_feature (42)..(42): n is a, c, g, or t
  misc_feature (48)..(48): n is a, c, g, or t
  misc_feature (51)..(51): n is a, c, g, or t
  misc_feature (54)..(54): n is a, c, g, or t
  misc_feature (57)..(57): n is a, c, g, or t
  misc_feature (63)..(63): n is a, c, g, or t
  misc_feature (66)..(66): n is a, c, g, or t
  misc_feature (72)..(72): n is a, c, g, or t
  misc_feature (75)..(75): n is a, c, g, or t
  misc_feature (78)..(78): n is a, c, g, or t
  misc_feature (84)..(84): n is a, c, g, or t
  misc_feature (87)..(87): n is a, c, g, or t
  misc_feature (93)..(93): n is a, c, g, or t
  misc_feature (96)..(96): n is a, c, g, or t
  misc_feature (99)..(99): n is a, c, g, or t
  misc_feature (102)..(102): n is a, c, g, or t
  misc_feature (105)..(105): n is a, c, g, or t
  misc_feature (114)..(114): n is a, c, g, or t
  misc_feature (123)..(123): n is a, c, g, or t
  misc_feature (126)..(126): n is a, c, g, or t
  misc_feature (129)..(129): n is a, c, g, or t
  misc_feature (132)..(132): n is a, c, g, or t
  misc_feature (135)..(135): n is a, c, g, or t
  misc_feature (138)..(138): n is a, c, g, or t
  misc_feature (141)..(141): n is a, c, g, or t
  misc_feature (144)..(144): n is a, c, g, or t
  misc_feature (147)..(147): n is a, c, g, or t
  misc_feature (150)..(150): n is a, c, g, or t
  misc_feature (159)..(159): n is a, c, g, or t
  misc_feature (162)..(162): n is a, c, g, or t
  misc_feature (168)..(168): n is a, c, g, or t
  misc_feature (171)..(171): n is a, c, g, or t
  misc_feature (177)..(177): n is a, c, g, or t
  misc_feature (180)..(180): n is a, c, g, or t
  misc_feature (183)..(183): n is a, c, g, or t
  misc_feature (189)..(189): n is a, c, g, or t
  misc_feature (195)..(195): n is a, c, g, or t
  misc_feature (198)..(198): n is a, c, g, or t
  misc_feature (207)..(207): n is a, c, g, or t
  misc_feature (210)..(210): n is a, c, g, or t
  misc_feature (216)..(216): n is a, c, g, or t
  misc_feature (219)..(219): n is a, c, g, or t
  misc_feature (222)..(222): n is a, c, g, or t
  misc_feature (225)..(225): n is a, c, g, or t
  misc_feature (231)..(231): n is a, c, g, or t
  misc_feature (234)..(234): n is a, c, g, or t
  misc_feature (237)..(237): n is a, c, g, or t
  misc_feature (243)..(243): n is a, c, g, or t
  misc_feature (246)..(246): n is a, c, g, or t
  misc_feature (249)..(249): n is a, c, g, or t
  misc_feature (252)..(252): n is a, c, g, or t
  misc_feature (255)..(255): n is a, c, g, or t
  misc_feature (264)..(264): n is a, c, g, or t
  misc_feature (267)..(267): n is a, c, g, or t
  misc_feature (273)..(273): n is a, c, g, or t
  misc_feature (276)..(276): n is a, c, g, or t
  misc_feature (282)..(282): n is a, c, g, or t
  misc_feature (285)..(285): n is a, c, g, or t
  misc_feature (291)..(291): n is a, c, g, or t
  misc_feature (294)..(294): n is a, c, g, or t
  misc_feature (303)..(303): n is a, c, g, or t
  misc_feature (306)..(306): n is a, c, g, or t
  misc_feature (312)..(312): n is a, c, g, or t
  misc_feature (315)..(315): n is a, c, g, or t
  misc_feature (324)..(324): n is a, c, g, or t
  misc_feature (327)..(327): n is a, c, g, or t
  misc_feature (333)..(333): n is a, c, g, or t
  misc_feature (339)..(339): n is a, c, g, or t
  misc_feature (342)..(342): n is a, c, g, or t
  misc_feature (345)..(345): n is a, c, g, or t
  misc_feature (348)..(348): n is a, c, g, or t
ggnathwsngcnwsncargcngargarwsngcngcnaaygcngayacnwsngcnggngargcnwsngarwsngcnmgncargcngcngarwsngcngcnwsngcnaarcarwsngargaygcnwsnwsnwsnwsngcnwsngcngcngcncaraargcnwsngarwsnwsncarwsngcngcngaygcngarytnwsnaaraaracngcngarwsngcngcnggnaaygcngcnmgngaygcnacnacngcnacngaraargcnmgngarwsngcngarwsngcncarwsngcngarcarwsnmgnathgcngcngargargcngtnaaymgnathccnacngtngtn

SEQ ID NO: 872 - DNA, 348 bp, Artificial Sequence
  PCoil-CNA34
  misc_feature (3)..(3): n is a, c, g, or t
  misc_feature (9)..(9): n is a, c, g, or t
  misc_feature (12)..(12): n is a, c, g, or t
  misc_feature (15)..(15): n is a, c, g, or t
  misc_feature (21)..(21): n is a, c, g, or t
  misc_feature (30)..(30): n is a, c, g, or t
  misc_feature (33)..(33): n is a, c, g, or t
  misc_feature (36)..(36): n is a, c, g, or t
  misc_feature (42)..(42): n is a, c, g, or t
  misc_feature (48)..(48): n is a, c, g, or t
  misc_feature (51)..(51): n is a, c, g, or t
  misc_feature (54)..(54): n is a, c, g, or t
  misc_feature (57)..(57): n is a, c, g, or t
  misc_feature (63)..(63): n is a, c, g, or t
  misc_feature (66)..(66): n is a, c, g, or t
  misc_feature (72)..(72): n is a, c, g, or t
  misc_feature (75)..(75): n is a, c, g, or t
  misc_feature (78)..(78): n is a, c, g, or t
  misc_feature (84)..(84): n is a, c, g, or t
  misc_feature (87)..(87): n is a, c, g, or t
  misc_feature (93)..(93): n is a, c, g, or t
  misc_feature (96)..(96): n is a, c, g, or t
  misc_feature (99)..(99): n is a, c, g, or t
  misc_feature (102)..(102): n is a, c, g, or t
  misc_feature (105)..(105): n is a, c, g, or t
  misc_feature (114)..(114): n is a, c, g, or t
  misc_feature (123)..(123): n is a, c, g, or t
  misc_feature (126)..(126): n is a, c, g, or t
  misc_feature (129)..(129): n is a, c, g, or t
  misc_feature (132)..(132): n is a, c, g, or t
  misc_feature (135)..(135): n is a, c, g, or t
  misc_feature (138)..(138): n is a, c, g, or t
  misc_feature (141)..(141): n is a, c, g, or t
  misc_feature (144)..(144): n is a, c, g, or t
  misc_feature (147)..(147): n is a, c, g, or t
  misc_feature (150)..(150): n is a, c, g, or t
  misc_feature (159)..(159): n is a, c, g, or t
  misc_feature (162)..(162): n is a, c, g, or t
  misc_feature (168)..(168): n is a, c, g, or t
  misc_feature (171)..(171): n is a, c, g, or t
  misc_feature (177)..(177): n is a, c, g, or t
  misc_feature (180)..(180): n is a, c, g, or t
  misc_feature (183)..(183): n is a, c, g, or t
  misc_feature (189)..(189): n is a, c, g, or t
  misc_feature (195)..(195): n is a, c, g, or t
  misc_feature (198)..(198): n is a, c, g, or t
  misc_feature (201)..(201): n is a, c, g, or t
  misc_feature (207)..(207): n is a, c, g, or t
  misc_feature (210)..(210): n is a, c, g, or t
  misc_feature (216)..(216): n is a, c, g, or t
  misc_feature (219)..(219): n is a, c, g, or t
  misc_feature (222)..(222): n is a, c, g, or t
  misc_feature (225)..(225): n is a, c, g, or t
  misc_feature (231)..(231): n is a, c, g, or t
  misc_feature (234)..(234): n is a, c, g, or t
  misc_feature (237)..(237): n is a, c, g, or t
  misc_feature (243)..(243): n is a, c, g, or t
  misc_feature (246)..(246): n is a, c, g, or t
  misc_feature (249)..(249): n is a, c, g, or t
  misc_feature (252)..(252): n is a, c, g, or t
  misc_feature (255)..(255): n is a, c, g, or t
  misc_feature (264)..(264): n is a, c, g, or t
  misc_feature (267)..(267): n is a, c, g, or t
  misc_feature (273)..(273): n is a, c, g, or t
  misc_feature (276)..(276): n is a, c, g, or t
  misc_feature (282)..(282): n is a, c, g, or t
  misc_feature (285)..(285): n is a, c, g, or t
  misc_feature (291)..(291): n is a, c, g, or t
  misc_feature (294)..(294): n is a, c, g, or t
  misc_feature (303)..(303): n is a, c, g, or t
  misc_feature (306)..(306): n is a, c, g, or t
  misc_feature (312)..(312): n is a, c, g, or t
  misc_feature (315)..(315): n is a, c, g, or t
  misc_feature (324)..(324): n is a, c, g, or t
  misc_feature (327)..(327): n is a, c, g, or t
  misc_feature (333)..(333): n is a, c, g, or t
  misc_feature (339)..(339): n is a, c, g, or t
  misc_feature (342)..(342): n is a, c, g, or t
  misc_feature (345)..(345): n is a, c, g, or t
  misc_feature (348)..(348): n is a, c, g, or t
ggnathwsngcnwsncargcngargarwsngcngcnaaygcngayacnwsngcnggngaygcnwsngarwsngcnmgncargcngcngarwsngcngcnwsngcnaarcarwsngargaygcnwsnwsnwsnwsngcnwsngcngcngcncaraargcnwsngarwsnwsncarwsngcngcngargcngarytnwsnmgnaaracngcngarwsngcngcnggnaaygcngcnmgngaygcnacnacngcnacngaraargcnmgngarwsngcngarwsngcncarwsngcngarcarwsnmgnathgcngcngargargcngtnaaymgnathccnacngtngtn

SEQ ID NO: 873 - DNA, 348 bp, Artificial Sequence
  PCoil-CNA35
  misc_feature (3)..(3): n is a, c, g, or t
  misc_feature (9)..(9): n is a, c, g, or t
  misc_feature (12)..(12): n is a, c, g, or t
  misc_feature (15)..(15): n is a, c, g, or t
  misc_feature (21)..(21): n is a, c, g, or t
  misc_feature (30)..(30): n is a, c, g, or t
  misc_feature (33)..(33): n is a, c, g, or t
  misc_feature (36)..(36): n is a, c, g, or t
  misc_feature (42)..(42): n is a, c, g, or t
  misc_feature (48)..(48): n is a, c, g, or t
  misc_feature (51)..(51): n is a, c, g, or t
  misc_feature (54)..(54): n is a, c, g, or t
  misc_feature (57)..(57): n is a, c, g, or t
  misc_feature (63)..(63): n is a, c, g, or t
  misc_feature (66)..(66): n is a, c, g, or t
  misc_feature (72)..(72): n is a, c, g, or t
  misc_feature (75)..(75): n is a, c, g, or t
  misc_feature (78)..(78): n is a, c, g, or t
  misc_feature (84)..(84): n is a, c, g, or t
  misc_feature (87)..(87): n is a, c, g, or t
  misc_feature (93)..(93): n is a, c, g, or t
  misc_feature (96)..(96): n is a, c, g, or t
  misc_feature (99)..(99): n is a, c, g, or t
  misc_feature (102)..(102): n is a, c, g, or t
  misc_feature (105)..(105): n is a, c, g, or t
  misc_feature (114)..(114): n is a, c, g, or t
  misc_feature (123)..(123): n is a, c, g, or t
  misc_feature (126)..(126): n is a, c, g, or t
  misc_feature (129)..(129): n is a, c, g, or t
  misc_feature (132)..(132): n is a, c, g, or t
  misc_feature (135)..(135): n is a, c, g, or t
  misc_feature (138)..(138): n is a, c, g, or t
  misc_feature (141)..(141): n is a, c, g, or t
  misc_feature (144)..(144): n is a, c, g, or t
  misc_feature (147)..(147): n is a, c, g, or t
  misc_feature (150)..(150): n is a, c, g, or t
  misc_feature (159)..(159): n is a, c, g, or t
  misc_feature (162)..(162): n is a, c, g, or t
  misc_feature (168)..(168): n is a, c, g, or t
  misc_feature (171)..(171): n is a, c, g, or t
  misc_feature (177)..(177): n is a, c, g, or t
  misc_feature (180)..(180): n is a, c, g, or t
  misc_feature (183)..(183): n is a, c, g, or t
  misc_feature (189)..(189): n is a, c, g, or t
  misc_feature (195)..(195): n is a, c, g, or t
  misc_feature (198)..(198): n is a, c, g, or t
  misc_feature (207)..(207): n is a, c, g, or t
  misc_feature (210)..(210): n is a, c, g, or t
  misc_feature (216)..(216): n is a, c, g, or t
  misc_feature (219)..(219): n is a, c, g, or t
  misc_feature (222)..(222): n is a, c, g, or t
  misc_feature (225)..(225): n is a, c, g, or t
  misc_feature (231)..(231): n is a, c, g, or t
  misc_feature (234)..(234): n is a, c, g, or t
  misc_feature (237)..(237): n is a, c, g, or t
  misc_feature (243)..(243): n is a, c, g, or t
  misc_feature (246)..(246): n is a, c, g, or t
  misc_feature (249)..(249): n is a, c, g, or t
  misc_feature (252)..(252): n is a, c, g, or t
  misc_feature (255)..(255): n is a, c, g, or t
  misc_feature (264)..(264): n is a, c, g, or t
  misc_feature (267)..(267): n is a, c, g, or t
  misc_feature (273)..(273): n is a, c, g, or t
  misc_feature (276)..(276): n is a, c, g, or t
  misc_feature (282)..(282): n is a, c, g, or t
  misc_feature (285)..(285): n is a, c, g, or t
  misc_feature (291)..(291): n is a, c, g, or t
  misc_feature (294)..(294): n is a, c, g, or t
  misc_feature (303)..(303): n is a, c, g, or t
  misc_feature (306)..(306): n is a, c, g, or t
  misc_feature (312)..(312): n is a, c, g, or t
  misc_feature (315)..(315): n is a, c, g, or t
  misc_feature (324)..(324): n is a, c, g, or t
  misc_feature (327)..(327): n is a, c, g, or t
  misc_feature (333)..(333): n is a, c, g, or t
  misc_feature (339)..(339): n is a, c, g, or t
  misc_feature (342)..(342): n is a, c, g, or t
  misc_feature (345)..(345): n is a, c, g, or t
  misc_feature (348)..(348): n is a, c, g, or t
ggnathwsngcnwsncargcngargarwsngcngcnaaygcngayacnwsngcnggngargcnwsngarwsngcnmgncargcngcngarwsngcngcngcngcnaarcarwsngargaygcnwsnwsnwsnwsngcnwsngcngcngcncaraargcnwsngarwsnwsncarwsngcngcngargcngarytnwsnaaraaracngcngarwsngcngcnggnaaygcngcnmgngaygcnacnacngcnacngaraargcnmgngarwsngcngarwsngcncarwsngcngarcarwsnmgnathgcngcngargargcngtnaaymgnathccnacngtngtn

SEQ ID NO: 874 - DNA, 348 bp, Artificial Sequence
  PCoil-CNA36
  misc_feature (3)..(3): n is a, c, g, or t
  misc_feature (9)..(9): n is a, c, g, or t
  misc_feature (12)..(12): n is a, c, g, or t
  misc_feature (15)..(15): n is a, c, g, or t
  misc_feature (21)..(21): n is a, c, g, or t
  misc_feature (30)..(30): n is a, c, g, or t
  misc_feature (33)..(33): n is a, c, g, or t
  misc_feature (36)..(36): n is a, c, g, or t
  misc_feature (42)..(42): n is a, c, g, or t
  misc_feature (48)..(48): n is a, c, g, or t
  misc_feature (51)..(51): n is a, c, g, or t
  misc_feature (54)..(54): n is a, c, g, or t
  misc_feature (57)..(57): n is a, c, g, or t
  misc_feature (63)..(63): n is a, c, g, or t
  misc_feature (66)..(66): n is a, c, g, or t
  misc_feature (72)..(72): n is a, c, g, or t
  misc_feature (75)..(75): n is a, c, g, or t
  misc_feature (78)..(78): n is a, c, g, or t
  misc_feature (84)..(84): n is a, c, g, or t
  misc_feature (87)..(87): n is a, c, g, or t
  misc_feature (93)..(93): n is a, c, g, or t
  misc_feature (96)..(96): n is a, c, g, or t
  misc_feature (99)..(99): n is a, c, g, or t
  misc_feature (102)..(102): n is a, c, g, or t
  misc_feature (105)..(105): n is a, c, g, or t
  misc_feature (114)..(114): n is a, c, g, or t
  misc_feature (123)..(123): n is a, c, g, or t
  misc_feature (126)..(126): n is a, c, g, or t
  misc_feature (129)..(129): n is a, c, g, or t
  misc_feature (132)..(132): n is a, c, g, or t
  misc_feature (135)..(135): n is a, c, g, or t
  misc_feature (138)..(138): n is a, c, g, or t
  misc_feature (141)..(141): n is a, c, g, or t
  misc_feature (144)..(144): n is a, c, g, or t
  misc_feature (147)..(147): n is a, c, g, or t
  misc_feature (150)..(150): n is a, c, g, or t
  misc_feature (159)..(159): n is a, c, g, or t
  misc_feature (162)..(162): n is a, c, g, or t
  misc_feature (168)..(168): n is a, c, g, or t
  misc_feature (171)..(171): n is a, c, g, or t
  misc_feature (177)..(177): n is a, c, g, or t
  misc_feature (180)..(180): n is a, c, g, or t
  misc_feature (183)..(183): n is a, c, g, or t
  misc_feature (189)..(189): n is a, c, g, or t
  misc_feature (195)..(195): n is a, c, g, or t
  misc_feature (198)..(198): n is a, c, g, or t
  misc_feature (201)..(201): n is a, c, g, or t
  misc_feature (207)..(207): n is a, c, g, or t
  misc_feature (210)..(210): n is a, c, g, or t
  misc_feature (216)..(216): n is a, c, g, or t
  misc_feature (219)..(219): n is a, c, g, or t
  misc_feature (222)..(222): n is a, c, g, or t
  misc_feature (225)..(225): n is a, c, g, or t
  misc_feature (231)..(231): n is a, c, g, or t
  misc_feature (234)..(234): n is a, c, g, or t
  misc_feature (237)..(237): n is a, c, g, or t
  misc_feature (243)..(243): n is a, c, g, or t
  misc_feature (246)..(246): n is a, c, g, or t
  misc_feature (249)..(249): n is a, c, g, or t
  misc_feature (252)..(252): n is a, c, g, or t
  misc_feature (255)..(255): n is a, c, g, or t
  misc_feature (264)..(264): n is a, c, g, or t
  misc_feature (267)..(267): n is a, c, g, or t
  misc_feature (273)..(273): n is a, c, g, or t
  misc_feature (276)..(276): n is a, c, g, or t
  misc_feature (282)..(282): n is a, c, g, or t
  misc_feature (285)..(285): n is a, c, g, or t
  misc_feature (291)..(291): n is a, c, g, or t
  misc_feature (294)..(294): n is a, c, g, or t
  misc_feature (303)..(303): n is a, c, g, or t
  misc_feature (306)..(306): n is a, c, g, or t
  misc_feature (312)..(312): n is a, c, g, or t
  misc_feature (315)..(315): n is a, c, g, or t
  misc_feature (324)..(324): n is a, c, g, or t
  misc_feature (327)..(327): n is a, c, g, or t
  misc_feature (333)..(333): n is a, c, g, or t
  misc_feature (339)..(339): n is a, c, g, or t
  misc_feature (342)..(342): n is a, c, g, or t
  misc_feature (345)..(345): n is a, c, g, or t
  misc_feature (348)..(348): n is a, c, g, or t
ggnathwsngcnwsncargcngargarwsngcngcnaaygcngayacnwsngcnggngaygcnwsngarwsngcnmgncargcngcngarwsngcngcngcngcnaarcarwsngargaygcnwsnwsnwsnwsngcnwsngcngcngcncaraargcnwsngarwsnwsncarwsngcngcngargcngarytnwsnmgnaaracngcngarwsngcngcnggnaaygcngcnmgngaygcnacnacngcnacngaraargcnmgngarwsngcngarwsngcncarwsngcngarcarwsnmgnathgcngcngargargcngtnaaymgnathccnacngtngtn

SEQ ID NO: 875 - DNA, 348 bp, Artificial Sequence
  PCoil-CNA37
  misc_feature (3)..(3): n is a, c, g, or t
  misc_feature (9)..(9): n is a, c, g, or t
  misc_feature (12)..(12): n is a, c, g, or t
  misc_feature (15)..(15): n is a, c, g, or t
  misc_feature (21)..(21): n is a, c, g, or t
  misc_feature (30)..(30): n is a, c, g, or t
  misc_feature (33)..(33): n is a, c, g, or t
  misc_feature (36)..(36): n is a, c, g, or t
  misc_feature (42)..(42): n is a, c, g, or t
  misc_feature (48)..(48): n is a, c, g, or t
  misc_feature (51)..(51): n is a, c, g, or t
  misc_feature (54)..(54): n is a, c, g, or t
  misc_feature (57)..(57): n is a, c, g, or t
  misc_feature (63)..(63): n is a, c, g, or t
  misc_feature (66)..(66): n is a, c, g, or t
  misc_feature (72)..(72): n is a, c, g, or t
  misc_feature (75)..(75): n is a, c, g, or t
  misc_feature (78)..(78): n is a, c, g, or t
  misc_feature (84)..(84): n is a, c, g, or t
  misc_feature (87)..(87): n is a, c, g, or t
  misc_feature (93)..(93): n is a, c, g, or t
  misc_feature (96)..(96): n is a, c, g, or t
  misc_feature (99)..(99): n is a, c, g, or t
  misc_feature (102)..(102): n is a, c, g, or t
  misc_feature (105)..(105): n is a, c, g, or t
  misc_feature (114)..(114): n is a, c, g, or t
  misc_feature (123)..(123): n is a, c, g, or t
  misc_feature (126)..(126): n is a, c, g, or t
  misc_feature (129)..(129): n is a, c, g, or t
  misc_feature (132)..(132): n is a, c, g, or t
  misc_feature (135)..(135): n is a, c, g, or t
  misc_feature (138)..(138): n is a, c, g, or t
  misc_feature (141)..(141): n is a, c, g, or t
  misc_feature (144)..(144): n is a, c, g, or t
  misc_feature (147)..(147): n is a, c, g, or t
  misc_feature (150)..(150): n is a, c, g, or t
  misc_feature (159)..(159): n is a, c, g, or t
  misc_feature (162)..(162): n is a, c, g, or t
  misc_feature (168)..(168): n is a, c, g, or t
  misc_feature (171)..(171): n is a, c, g, or t
  misc_feature (177)..(177): n is a, c, g, or t
  misc_feature (180)..(180): n is a, c, g, or t
  misc_feature (183)..(183): n is a, c, g, or t
  misc_feature (189)..(189): n is a, c, g, or t
  misc_feature (195)..(195): n is a, c, g, or t
  misc_feature (198)..(198): n is a, c, g, or t
  misc_feature (201)..(201): n is a, c, g, or t
  misc_feature (207)..(207): n is a, c, g, or t
  misc_feature (210)..(210): n is a, c, g, or t
  misc_feature (216)..(216): n is a, c, g, or t
  misc_feature (219)..(219): n is a, c, g, or t
  misc_feature (222)..(222): n is a, c, g, or t
  misc_feature (225)..(225): n is a, c, g, or t
  misc_feature (231)..(231): n is a, c, g, or t
  misc_feature (234)..(234): n is a, c, g, or t
  misc_feature (237)..(237): n is a, c, g, or t
  misc_feature (243)..(243): n is a, c, g, or t
  misc_feature (246)..(246): n is a, c, g, or t
  misc_feature (249)..(249): n is a, c, g, or t
  misc_feature (252)..(252): n is a, c, g, or t
  misc_feature (255)..(255): n is a, c, g, or t
  misc_feature (264)..(264): n is a, c, g, or t
  misc_feature (267)..(267): n is a, c, g, or t
  misc_feature (273)..(273): n is a, c, g, or t
  misc_feature (276)..(276): n is a, c, g, or t
  misc_feature (282)..(282): n is a, c, g, or t
  misc_feature (285)..(285): n is a, c, g, or t
  misc_feature (291)..(291): n is a, c, g, or t
  misc_feature (294)..(294): n is a, c, g, or t
  misc_feature (303)..(303): n is a, c, g, or t
  misc_feature (306)..(306): n is a, c, g, or t
  misc_feature (312)..(312): n is a, c, g, or t
  misc_feature (315)..(315): n is a, c, g, or t
  misc_feature (324)..(324): n is a, c, g, or t
  misc_feature (327)..(327): n is a, c, g, or t
  misc_feature (333)..(333): n is a, c, g, or t
  misc_feature (339)..(339): n is a, c, g, or t
  misc_feature (342)..(342): n is a, c, g, or t
  misc_feature (345)..(345): n is a, c, g, or t
  misc_feature (348)..(348): n is a, c, g, or t
ggnathwsngcnwsncargcngargarwsngcngcnaaygcngayacnwsngcnggngaygcnytngarwsngcnmgncargcngcngarwsngcngcngcngcnaarcarwsngargaygcnwsnwsnwsnwsngcnwsngcngcngcncaraargcnwsngarwsnwsncarwsngcngcngargcngarytnwsnmgnaaracngcngarwsngcngcnggnaaygcngcnmgngaygcnacnacngcnacngaraargcnmgngarwsngcngarwsngcncarwsngcngarcarwsnmgnathgcngcngargargcngtnaaymgnathccnacngtngtn

SEQ ID NO: 876 - DNA, 348 bp, Artificial Sequence
  PCoil-CNA38
  misc_feature (3)..(3): n is a, c, g, or t
  misc_feature (9)..(9): n is a, c, g, or t
  misc_feature (12)..(12): n is a, c, g, or t
  misc_feature (15)..(15): n is a, c, g, or t
  misc_feature (21)..(21): n is a, c, g, or t
  misc_feature (30)..(30): n is a, c, g, or t
  misc_feature (33)..(33): n is a, c, g, or t
  misc_feature (36)..(36): n is a, c, g, or t
  misc_feature (42)..(42): n is a, c, g, or t
  misc_feature (48)..(48): n is a, c, g, or t
  misc_feature (51)..(51): n is a, c, g, or t
  misc_feature (54)..(54): n is a, c, g, or t
  misc_feature (57)..(57): n is a, c, g, or t
  misc_feature (63)..(63): n is a, c, g, or t
  misc_feature (66)..(66): n is a, c, g, or t
  misc_feature (72)..(72): n is a, c, g, or t
  misc_feature (75)..(75): n is a, c, g, or t
  misc_feature (78)..(78): n is a, c, g, or t
  misc_feature (84)..(84): n is a, c, g, or t
  misc_feature (87)..(87): n is a, c, g, or t
  misc_feature (93)..(93): n is a, c, g, or t
  misc_feature (96)..(96): n is a, c, g, or t
  misc_feature (99)..(99): n is a, c, g, or t
  misc_feature (102)..(102): n is a, c, g, or t
  misc_feature (105)..(105): n is a, c, g, or t
  misc_feature (114)..(114): n is a, c, g, or t
  misc_feature (123)..(123): n is a, c, g, or t
  misc_feature (126)..(126): n is a, c, g, or t
  misc_feature (129)..(129): n is a, c, g, or t
  misc_feature (132)..(132): n is a, c, g, or t
  misc_feature (135)..(135): n is a, c, g, or t
  misc_feature (138)..(138): n is a, c, g, or t
  misc_feature (141)..(141): n is a, c, g, or t
  misc_feature (144)..(144): n is a, c, g, or t
  misc_feature (147)..(147): n is a, c, g, or t
  misc_feature (150)..(150): n is a, c, g, or t
  misc_feature (159)..(159): n is a, c, g, or t
  misc_feature (162)..(162): n is a, c, g, or t
  misc_feature (168)..(168): n is a, c, g, or t
  misc_feature (171)..(171): n is a, c, g, or t
  misc_feature (177)..(177): n is a, c, g, or t
  misc_feature (180)..(180): n is a, c, g, or t
  misc_feature (183)..(183): n is a, c, g, or t
  misc_feature (189)..(189): n is a, c, g, or t
  misc_feature (195)..(195): n is a, c, g, or t
  misc_feature (198)..(198): n is a, c, g, or t
  misc_feature (201)..(201): n is a, c, g, or t
  misc_feature (207)..(207): n is a, c, g, or t
  misc_feature (210)..(210): n is a, c, g, or t
  misc_feature (216)..(216): n is a, c, g, or t
  misc_feature (219)..(219): n is a, c, g, or t
  misc_feature (222)..(222): n is a, c, g, or t
  misc_feature (225)..(225): n is a, c, g, or t
  misc_feature (231)..(231): n is a, c, g, or t
  misc_feature (234)..(234): n is a, c, g, or t
  misc_feature (237)..(237): n is a, c, g, or t
  misc_feature (243)..(243): n is a, c, g, or t
  misc_feature (246)..(246): n is a, c, g, or t
  misc_feature (249)..(249): n is a, c, g, or t
  misc_feature (252)..(252): n is a, c, g, or t
  misc_feature (255)..(255): n is a, c, g, or t
  misc_feature (264)..(264): n is a, c, g, or t
  misc_feature (267)..(267): n is a, c, g, or t
  misc_feature (273)..(273): n is a, c, g, or t
  misc_feature (276)..(276): n is a, c, g, or t
  misc_feature (282)..(282): n is a, c, g, or t
  misc_feature (285)..(285): n is a, c, g, or t
  misc_feature (291)..(291): n is a, c, g, or t
  misc_feature (294)..(294): n is a, c, g, or t
  misc_feature (303)..(303): n is a, c, g, or t
  misc_feature (306)..(306): n is a, c, g, or t
  misc_feature (312)..(312): n is a, c, g, or t
  misc_feature (315)..(315): n is a, c, g, or t
  misc_feature (324)..(324): n is a, c, g, or t
  misc_feature (327)..(327): n is a, c, g, or t
  misc_feature (333)..(333): n is a, c, g, or t
  misc_feature (339)..(339): n is a, c, g, or t
  misc_feature (342)..(342): n is a, c, g, or t
  misc_feature (345)..(345): n is a, c, g, or t
  misc_feature (348)..(348): n is a, c, g, or t
ggnathwsngcnwsncargcngargarwsngcngcnaaygcngayacnwsngcnggngaygcnytngarwsngcnmgncargcngcngarwsngcngcngcngcnaarcarwsngargargcnwsnwsnwsnwsngcnwsngcngcngcncaraargcnwsngarwsnwsncarwsngcngcngargcngarytnwsnmgnaaracngcngarwsngcngcnggnaaygcngcnmgngaygcnacnacngcnacngaraargcnmgngarwsngcngarwsngcncarwsngcngarcarwsnmgnathgcngcngargargcngtnaaymgnathccnacngtngtn

SEQ ID NO: 877 - DNA, 348 bp, Artificial Sequence
  PCoil-CNA39
  misc_feature (3)..(3): n is a, c, g, or t
  misc_feature (9)..(9): n is a, c, g, or t
  misc_feature (12)..(12): n is a, c, g, or t
  misc_feature (15)..(15): n is a, c, g, or t
  misc_feature (21)..(21): n is a, c, g, or t
  misc_feature (30)..(30): n is a, c, g, or t
  misc_feature (33)..(33): n is a, c, g, or t
  misc_feature (36)..(36): n is a, c, g, or t
  misc_feature (42)..(42): n is a, c, g, or t
  misc_feature (48)..(48): n is a, c, g, or t
  misc_feature (51)..(51): n is a, c, g, or t
  misc_feature (54)..(54): n is a, c, g, or t
  misc_feature (57)..(57): n is a, c, g, or t
  misc_feature (63)..(63): n is a, c, g, or t
  misc_feature (66)..(66): n is a, c, g, or t
  misc_feature (72)..(72): n is a, c, g, or t
  misc_feature (75)..(75): n is a, c, g, or t
  misc_feature (78)..(78): n is a, c, g, or t
  misc_feature (84)..(84): n is a, c, g, or t
  misc_feature (87)..(87): n is a, c, g, or t
  misc_feature (93)..(93): n is a, c, g, or t
  misc_feature (96)..(96): n is a, c, g, or t
  misc_feature (99)..(99): n is a, c, g, or t
  misc_feature (102)..(102): n is a, c, g, or t
  misc_feature (105)..(105): n is a, c, g, or t
  misc_feature (114)..(114): n is a, c, g, or t
  misc_feature (123)..(123): n is a, c, g, or t
  misc_feature (126)..(126): n is a, c, g, or t
  misc_feature (129)..(129): n is a, c, g, or t
  misc_feature (132)..(132): n is a, c, g, or t
  misc_feature (135)..(135): n is a, c, g, or t
  misc_feature (138)..(138): n is a, c, g, or t
  misc_feature (141)..(141): n is a, c, g, or t
  misc_feature (144)..(144): n is a, c, g, or t
  misc_feature (147)..(147): n is a, c, g, or t
  misc_feature (150)..(150): n is a, c, g, or t
  misc_feature (159)..(159): n is a, c, g, or t
  misc_feature (162)..(162): n is a, c, g, or t
  misc_feature (168)..(168): n is a, c, g, or t
  misc_feature (171)..(171): n is a, c, g, or t
  misc_feature (177)..(177): n is a, c, g, or t
  misc_feature (180)..(180): n is a, c, g, or t
  misc_feature (183)..(183): n is a, c, g, or t
  misc_feature (189)..(189): n is a, c, g, or t
  misc_feature (195)..(195): n is a, c, g, or t
  misc_feature (198)..(198): n is a, c, g, or t
  misc_feature (207)..(207): n is a, c, g, or t
  misc_feature (210)..(210): n is a, c, g, or t
  misc_feature (216)..(216): n is a, c, g, or t
  misc_feature (219)..(219): n is a, c, g, or t
  misc_feature (222)..(222): n is a, c, g, or t
  misc_feature (225)..(225): n is a, c, g, or t
  misc_feature (231)..(231): n is a, c, g, or t
  misc_feature (234)..(234): n is a, c, g, or t
  misc_feature (237)..(237): n is a, c, g, or t
  misc_feature (243)..(243): n is a, c, g, or t
  misc_feature (246)..(246): n is a, c, g, or t
  misc_feature (249)..(249): n is a, c, g, or t
  misc_feature (252)..(252): n is a, c, g, or t
  misc_feature (255)..(255): n is a, c, g, or t
  misc_feature (264)..(264): n is a, c, g, or t
  misc_feature (267)..(267): n is a, c, g, or t
  misc_feature (273)..(273): n is a, c, g, or t
  misc_feature (276)..(276): n is a, c, g, or t
  misc_feature (282)..(282): n is a, c, g, or t
  misc_feature (285)..(285): n is a, c, g, or t
  misc_feature (291)..(291): n is a, c, g, or t
  misc_feature (294)..(294): n is a, c, g, or t
  misc_feature (303)..(303): n is a, c, g, or t
  misc_feature (306)..(306): n is a, c, g, or t
  misc_feature (312)..(312): n is a, c, g, or t
  misc_feature (315)..(315): n is a, c, g, or t
  misc_feature (324)..(324): n is a, c, g, or t
  misc_feature (327)..(327): n is a, c, g, or t
  misc_feature (333)..(333): n is a, c, g, or t
  misc_feature (339)..(339): n is a, c, g, or t
  misc_feature (342)..(342): n is a, c, g, or t
  misc_feature (345)..(345): n is a, c, g, or t
  misc_feature (348)..(348): n is a, c, g, or t
ggnathwsngcnwsncargcngargarwsngcngcnaaygcngayacnwsngcnggngaygcnwsngarwsngcnmgncargcngcngarwsngcngcngcngcnaarcarwsngargargcnwsnwsnwsnwsngcnwsngcngcngcncaraargcnwsngarwsnwsncarwsngcngcngargcngarytnwsnaaraaracngcngarwsngcngcnggnaaygcngcnmgngaygcnacnacngcnacngaraargcnmgngarwsngcngarwsngcncarwsngcngarcarwsnmgnathgcngcngargargcngtnaaymgnathccnacngtngtn

SEQ ID NO: 878 - DNA, 348 bp, Artificial Sequence
  PCoil-CNA40
  misc_feature (3)..(3): n is a, c, g, or t
  misc_feature (9)..(9): n is a, c, g, or t
  misc_feature (12)..(12): n is a, c, g, or t
  misc_feature (15)..(15): n is a, c, g, or t
  misc_feature (21)..(21): n is a, c, g, or t
  misc_feature (30)..(30): n is a, c, g, or t
  misc_feature (33)..(33): n is a, c, g, or t
  misc_feature (36)..(36): n is a, c, g, or t
  misc_feature (42)..(42): n is a, c, g, or t
  misc_feature (48)..(48): n is a, c, g, or t
  misc_feature (51)..(51): n is a, c, g, or t
  misc_feature (54)..(54): n is a, c, g, or t
  misc_feature (57)..(57): n is a, c, g, or t
  misc_feature (63)..(63): n is a, c, g, or t
  misc_feature (66)..(66): n is a, c, g, or t
  misc_feature (72)..(72): n is a, c, g, or t
  misc_feature (75)..(75): n is a, c, g, or t
  misc_feature (78)..(78): n is a, c, g, or t
  misc_feature (84)..(84): n is a, c, g, or t
  misc_feature (87)..(87): n is a, c, g, or t
  misc_feature (93)..(93): n is a, c, g, or t
  misc_feature (96)..(96): n is a, c, g, or t
  misc_feature (99)..(99): n is a, c, g, or t
  misc_feature (102)..(102): n is a, c, g, or t
  misc_feature (105)..(105): n is a, c, g, or t
  misc_feature (114)..(114): n is a, c, g, or t
  misc_feature (123)..(123): n is a, c, g, or t
  misc_feature (126)..(126): n is a, c, g, or t
  misc_feature (129)..(129): n is a, c, g, or t
  misc_feature (132)..(132): n is a, c, g, or t
  misc_feature (135)..(135): n is a, c, g, or t
  misc_feature (138)..(138): n is a, c, g, or t
  misc_feature (141)..(141): n is a, c, g, or t
  misc_feature (144)..(144): n is a, c, g, or t
  misc_feature (147)..(147): n is a, c, g, or t
  misc_feature (150)..(150): n is a, c, g, or t
  misc_feature (159)..(159): n is a, c, g, or t
  misc_feature (162)..(162): n is a, c, g, or t
  misc_feature (168)..(168): n is a, c, g, or t
  misc_feature (171)..(171): n is a, c, g, or t
  misc_feature (177)..(177): n is a, c, g, or t
  misc_feature (180)..(180): n is a, c, g, or t
  misc_feature (183)..(183): n is a, c, g, or t
  misc_feature (189)..(189): n is a, c, g, or t
  misc_feature (195)..(195): n is a, c, g, or t
  misc_feature (198)..(198): n is a, c, g, or t
  misc_feature (201)..(201): n is a, c, g, or t
  misc_feature (207)..(207): n is a, c, g, or t
  misc_feature (210)..(210): n is a, c, g, or t
  misc_feature (216)..(216): n is a, c, g, or t
  misc_feature (219)..(219): n is a, c, g, or t
  misc_feature (222)..(222): n is a, c, g, or t
  misc_feature (225)..(225): n is a, c, g, or t
  misc_feature (231)..(231): n is a, c, g, or t
  misc_feature (234)..(234): n is a, c, g, or t
  misc_feature (237)..(237): n is a, c, g, or t
  misc_feature (243)..(243): n is a, c, g, or t
  misc_feature (246)..(246): n is a, c, g, or t
  misc_feature (249)..(249): n is a, c, g, or t
  misc_feature (252)..(252): n is a, c, g, or t
  misc_feature (255)..(255): n is a, c, g, or t
  misc_feature (264)..(264): n is a, c, g, or t
  misc_feature (267)..(267): n is a, c, g, or t
  misc_feature (273)..(273): n is a, c, g, or t
  misc_feature (276)..(276): n is a, c, g, or t
  misc_feature (282)..(282): n is a, c, g, or t
  misc_feature (285)..(285): n is a, c, g, or t
  misc_feature (291)..(291): n is a, c, g, or t
  misc_feature (294)..(294): n is a, c, g, or t
  misc_feature (303)..(303): n is a, c, g, or t
  misc_feature (306)..(306): n is a, c, g, or t
  misc_feature (312)..(312): n is a, c, g, or t
  misc_feature (315)..(315): n is a, c, g, or t
  misc_feature (324)..(324): n is a, c, g, or t
  misc_feature (327)..(327): n is a, c, g, or t
  misc_feature (333)..(333): n is a, c, g, or t
  misc_feature (339)..(339): n is a, c, g, or t
  misc_feature (342)..(342): n is a, c, g, or t
  misc_feature (345)..(345): n is a, c, g, or t
  misc_feature (348)..(348): n is a, c, g, or t
ggnathwsngcnwsncargcngargarwsngcngcnaaygcngayacnwsngcnggngaygcnwsngarwsngcnmgncargcngcngarwsngcngcngcngcnaarcarwsngargargcnwsnwsnwsnwsngcnwsngcngcngcncaraargcnwsngarwsnwsncarwsngcngcngaygcngarytnwsnmgnaaracngcngarwsngcngcnggnaaygcngcnmgngaygcnacnacngcnacngaraargcnmgngarwsngcngarwsngcncarwsngcngarcarwsnmgnathgcngcngargargcngtnaaymgnathccnacngtngtn

SEQ ID NO: 879 - DNA, 348 bp, Artificial Sequence
  PCoil-CNA41
  misc_feature (3)..(3): n is a, c, g, or t
  misc_feature (9)..(9): n is a, c, g, or t
  misc_feature (12)..(12): n is a, c, g, or t
  misc_feature (15)..(15): n is a, c, g, or t
  misc_feature (21)..(21): n is a, c, g, or t
  misc_feature (30)..(30): n is a, c, g, or t
  misc_feature (33)..(33): n is a, c, g, or t
  misc_feature (36)..(36): n is a, c, g, or t
  misc_feature (42)..(42): n is a, c, g, or t
  misc_feature (48)..(48): n is a, c, g, or t
  misc_feature (51)..(51): n is a, c, g, or t
  misc_feature (54)..(54): n is a, c, g, or t
  misc_feature (57)..(57): n is a, c, g, or t
  misc_feature (63)..(63): n is a, c, g, or t
  misc_feature (66)..(66): n is a, c, g, or t
  misc_feature (72)..(72): n is a, c, g, or t
  misc_feature (75)..(75): n is a, c, g, or t
  misc_feature (78)..(78): n is a, c, g, or t
  misc_feature (84)..(84): n is a, c, g, or t
  misc_feature (87)..(87): n is a, c, g, or t
  misc_feature (93)..(93): n is a, c, g, or t
  misc_feature (96)..(96): n is a, c, g, or t
  misc_feature (99)..(99): n is a, c, g, or t
  misc_feature (102)..(102): n is a, c, g, or t
  misc_feature (105)..(105): n is a, c, g, or t
  misc_feature (114)..(114): n is a, c, g, or t
  misc_feature (123)..(123): n is a, c, g, or t
  misc_feature (126)..(126): n is a, c, g, or t
  misc_feature (129)..(129): n is a, c, g, or t
  misc_feature (132)..(132): n is a, c, g, or t
  misc_feature (135)..(135): n is a, c, g, or t
  misc_feature (138)..(138): n is a, c, g, or t
  misc_feature (141)..(141): n is a, c, g, or t
  misc_feature (144)..(144): n is a, c, g, or t
  misc_feature (147)..(147): n is a, c, g, or t
  misc_feature (150)..(150): n is a, c, g, or t
  misc_feature (159)..(159): n is a, c, g, or t
  misc_feature (162)..(162): n is a, c, g, or t
  misc_feature (168)..(168): n is a, c, g, or t
  misc_feature (171)..(171): n is a, c, g, or t
  misc_feature (177)..(177): n is a, c, g, or t
  misc_feature (180)..(180): n is a, c, g, or t
  misc_feature (183)..(183): n is a, c, g, or t
  misc_feature (189)..(189): n is a, c, g, or t
  misc_feature (195)..(195): n is a, c, g, or t
  misc_feature (198)..(198): n is a, c, g, or t
  misc_feature (207)..(207): n is a, c, g, or t
  misc_feature (210)..(210): n is a, c, g, or t
  misc_feature (216)..(216): n is a, c, g, or t
  misc_feature (219)..(219): n is a, c, g, or t
  misc_feature (222)..(222): n is a, c, g, or t
  misc_feature (225)..(225): n is a, c, g, or t
  misc_feature (231)..(231): n is a, c, g, or t
  misc_feature (234)..(234): n is a, c, g, or t
  misc_feature (237)..(237): n is a, c, g, or t
  misc_feature (243)..(243): n is a, c, g, or t
  misc_feature (246)..(246): n is a, c, g, or t
  misc_feature (249)..(249): n is a, c, g, or t
  misc_feature (252)..(252): n is a, c, g, or t
  misc_feature (255)..(255): n is a, c, g, or t
  misc_feature (264)..(264): n is a, c, g, or t
  misc_feature (267)..(267): n is a, c, g, or t
  misc_feature (273)..(273): n is a, c, g, or t
  misc_feature (276)..(276): n is a, c, g, or t
  misc_feature (282)..(282): n is a, c, g, or t
  misc_feature (285)..(285): n is a, c, g, or t
  misc_feature (291)..(291): n is a, c, g, or t
  misc_feature (294)..(294): n is a, c, g, or t
  misc_feature (303)..(303): n is a, c, g, or t
  misc_feature (306)..(306): n is a, c, g, or t
  misc_feature (312)..(312): n is a, c, g, or t
  misc_feature (315)..(315): n is a, c, g, or t
  misc_feature (324)..(324): n is a, c, g, or t
  misc_feature (327)..(327): n is a, c, g, or t
  misc_feature (333)..(333): n is a, c, g, or t
  misc_feature (339)..(339): n is a, c, g, or t
  misc_feature (342)..(342): n is a, c, g, or t
  misc_feature (345)..(345): n is a, c, g, or t
  misc_feature (348)..(348): n is a, c, g, or t
ggnathwsngcnwsncargcngargarwsngcngcnaaygcngayacnwsngcnggngaygcnwsngarwsngcnmgncargcngcngarwsngcngcngcngcnaarcarwsngargargcnwsnwsnwsnwsngcnwsngcngcngcncaraargcnwsngarwsnwsncarwsngcngcngaygcngarytnwsnaaraaracngcngarwsngcngcnggnaaygcngcnmgngaygcnacnacngcnacngaraargcnmgngarwsngcngarwsngcncarwsngcngarcarwsnmgnathgcngcngargargcngtnaaymgnathccnacngtngtn

SEQ ID NO: 880 - DNA, 348 bp, Artificial Sequence
  PCoil-CNA42
  misc_feature (3)..(3): n is a, c, g, or t
  misc_feature (9)..(9): n is a, c, g, or t
  misc_feature (12)..(12): n is a, c, g, or t
  misc_feature (15)..(15): n is a, c, g, or t
  misc_feature (21)..(21): n is a, c, g, or t
  misc_feature (30)..(30): n is a, c, g, or t
  misc_feature (33)..(33): n is a, c, g, or t
  misc_feature (36)..(36): n is a, c, g, or t
  misc_feature (42)..(42): n is a, c, g, or t
  misc_feature (48)..(48): n is a, c, g, or t
  misc_feature (51)..(51): n is a, c, g, or t
  misc_feature (54)..(54): n is a, c, g, or t
  misc_feature (57)..(57): n is a, c, g, or t
  misc_feature (63)..(63): n is a, c, g, or t
  misc_feature (66)..(66): n is a, c, g, or t
  misc_feature (72)..(72): n is a, c, g, or t
  misc_feature (75)..(75): n is a, c, g, or t
  misc_feature (78)..(78): n is a, c, g, or t
  misc_feature (84)..(84): n is a, c, g, or t
  misc_feature (87)..(87): n is a, c, g, or t
  misc_feature (93)..(93): n is a, c, g, or t
  misc_feature (96)..(96): n is a, c, g, or t
  misc_feature (99)..(99): n is a, c, g, or t
  misc_feature (102)..(102): n is a, c, g, or t
  misc_feature (105)..(105): n is a, c, g, or t
  misc_feature (114)..(114): n is a, c, g, or t
  misc_feature (123)..(123): n is a, c, g, or t
  misc_feature (126)..(126): n is a, c, g, or t
  misc_feature (129)..(129): n is a, c, g, or t
  misc_feature (132)..(132): n is a, c, g, or t
  misc_feature (135)..(135): n is a, c, g, or t
  misc_feature (138)..(138): n is a, c, g, or t
  misc_feature (141)..(141): n is a, c, g, or t
  misc_feature (144)..(144): n is a, c, g, or t
  misc_feature (147)..(147): n is a, c, g, or t
  misc_feature (150)..(150): n is a, c, g, or t
  misc_feature (159)..(159): n is a, c, g, or t
  misc_feature (162)..(162): n is a, c, g, or t
  misc_feature (168)..(168): n is a, c, g, or t
  misc_feature (171)..(171): n is a, c, g, or t
  misc_feature (177)..(177): n is a, c, g, or t
  misc_feature (180)..(180): n is a, c, g, or t
  misc_feature (183)..(183): n is a, c, g, or t
  misc_feature (189)..(189): n is a, c, g, or t
  misc_feature (195)..(195): n is a, c, g, or t
  misc_feature (198)..(198): n is a, c, g, or t
  misc_feature (207)..(207): n is a, c, g, or t
  misc_feature (210)..(210): n is a, c, g, or t
  misc_feature (216)..(216): n is a, c, g, or t
  misc_feature (219)..(219): n is a, c, g, or t
  misc_feature (222)..(222): n is a, c, g, or t
  misc_feature (225)..(225): n is a, c, g, or t
  misc_feature (231)..(231): n is a, c, g, or t
  misc_feature (234)..(234): n is a, c, g, or t
  misc_feature (237)..(237): n is a, c, g, or t
  misc_feature (246)..(246): n is a, c, g, or t
  misc_feature (249)..(249): n is a, c, g, or t
  misc_feature (264)..(264): n is a, c, g, or t
  misc_feature (267)..(267): n is a, c, g, or t
  misc_feature (270)..(270): n is a, c, g, or t
  misc_feature (282)..(282): n is a, c, g, or t
  misc_feature (288)..(288): n is a, c, g, or t
  misc_feature (294)..(294): n is a, c, g, or t
  misc_feature (303)..(303): n is a, c, g, or t
  misc_feature (306)..(306): n is a, c, g, or t
  misc_feature (312)..(312): n is a, c, g, or t
  misc_feature (315)..(315): n is a, c, g, or t
  misc_feature (324)..(324): n is a, c, g, or t
  misc_feature (327)..(327): n is a, c, g, or t
  misc_feature (333)..(333): n is a, c, g, or t
  misc_feature (339)..(339): n is a, c, g, or t
  misc_feature (342)..(342): n is a, c, g, or t
  misc_feature (345)..(345): n is a, c, g, or t
  misc_feature (348)..(348): n is a, c, g, or t
ggnathwsngcnwsncargcngargarwsngcngcnaaygcngayacnwsngcnggngaygcnwsngarwsngcnmgncargcngcngarwsngcngcngcngcnaarcarwsngargargcnwsnwsnwsnwsngcnwsngcngcngcncaraargcnwsngarwsnwsncarwsngcngcngaygcngarytnwsnaaraaracngcngarwsngcngcnggnaaygcngcnmgnatgcarmgnccncarcaraaraarccnggnwsncarcaraargcncaywsncarmgngarcarwsnmgnathgcngcngargargcngtnaaymgnathccnacngtngtn

SEQ ID NO: 881 - DNA, 327 bp, Artificial Sequence
  PCoil-CNA43
  misc_feature (3)..(3): n is a, c, g, or t
  misc_feature (9)..(9): n is a, c, g, or t
  misc_feature (18)..(18): n is a, c, g, or t
  misc_feature (21)..(21): n is a, c, g, or t
  misc_feature (24)..(24): n is a, c, g, or t
  misc_feature (27)..(27): n is a, c, g, or t
  misc_feature (30)..(30): n is a, c, g, or t
  misc_feature (33)..(33): n is a, c, g, or t
  misc_feature (39)..(39): n is a, c, g, or t
  misc_feature (42)..(42): n is a, c, g, or t
  misc_feature (45)..(45): n is a, c, g, or t
  misc_feature (51)..(51): n is a, c, g, or t
  misc_feature (54)..(54): n is a, c, g, or t
  misc_feature (60)..(60): n is a, c, g, or t
  misc_feature (63)..(63): n is a, c, g, or t
  misc_feature (66)..(66): n is a, c, g, or t
  misc_feature (69)..(69): n is a, c, g, or t
  misc_feature (72)..(72): n is a, c, g, or t
  misc_feature (75)..(75): n is a, c, g, or t
  misc_feature (78)..(78): n is a, c, g, or t
  misc_feature (84)..(84): n is a, c, g, or t
  misc_feature (87)..(87): n is a, c, g, or t
  misc_feature (96)..(96): n is a, c, g, or t
  misc_feature (99)..(99): n is a, c, g, or t
  misc_feature (105)..(105): n is a, c, g, or t
  misc_feature (108)..(108): n is a, c, g, or t
  misc_feature (114)..(114): n is a, c, g, or t
  misc_feature (117)..(117): n is a, c, g, or t
  misc_feature (120)..(120): n is a, c, g, or t
  misc_feature (123)..(123): n is a, c, g, or t
  misc_feature (126)..(126): n is a, c, g, or t
  misc_feature (129)..(129): n is a, c, g, or t
  misc_feature (132)..(132): n is a, c, g, or t
  misc_feature (135)..(135): n is a, c, g, or t
  misc_feature (138)..(138): n is a, c, g, or t
  misc_feature (141)..(141): n is a, c, g, or t
  misc_feature (147)..(147): n is a, c, g, or t
  misc_feature (156)..(156): n is a, c, g, or t
  misc_feature (159)..(159): n is a, c, g, or t
  misc_feature (162)..(162): n is a, c, g, or t
  misc_feature (165)..(165): n is a, c, g, or t
  misc_feature (168)..(168): n is a, c, g, or t
  misc_feature (171)..(171): n is a, c, g, or t
  misc_feature (177)..(177): n is a, c, g, or t
  misc_feature (186)..(186): n is a, c, g, or t
  misc_feature (189)..(189): n is a, c, g, or t
  misc_feature (192)..(192): n is a, c, g, or t
  misc_feature (195)..(195): n is a, c, g, or t
  misc_feature (201)..(201): n is a, c, g, or t
  misc_feature (210)..(210): n is a, c, g, or t
  misc_feature (213)..(213): n is a, c, g, or t
  misc_feature (222)..(222): n is a, c, g, or t
  misc_feature (231)..(231): n is a, c, g, or t
  misc_feature (234)..(234): n is a, c, g, or t
  misc_feature (237)..(237): n is a, c, g, or t
  misc_feature (240)..(240): n is a, c, g, or t
  misc_feature (249)..(249): n is a, c, g, or t
  misc_feature (252)..(252): n is a, c, g, or t
  misc_feature (255)..(255): n is a, c, g, or t
  misc_feature (264)..(264): n is a, c, g, or t
  misc_feature (270)..(270): n is a, c, g, or t
  misc_feature (273)..(273): n is a, c, g, or t
  misc_feature (279)..(279): n is a, c, g, or t
  misc_feature (282)..(282): n is a, c, g, or t
  misc_feature (285)..(285): n is a, c, g, or t
  misc_feature (288)..(288): n is a, c, g, or t
  misc_feature (291)..(291): n is a, c, g, or t
  misc_feature (294)..(294): n is a, c, g, or t
  misc_feature (303)..(303): n is a, c, g, or t
  misc_feature (306)..(306): n is a, c, g, or t
  misc_feature (309)..(309): n is a, c, g, or t
  misc_feature (315)..(315): n is a, c, g, or t
  misc_feature (324)..(324): n is a, c, g, or t
  misc_feature (327)..(327): n is a, c, g, or t
acncarwsnaargarwsngcngcngcnwsngcnaarwsngcnwsngaywsngcnaaracngcnacnwsnmgngcngcngargcnggncaraargcnacngaygcnacngargcngcnacnmgngcngtnacngcngcnggnaaygcngargarwsnwsnacnmgngcnggngarwsngaraargcngcnggngcngaygcngaraargcnmgncarcaygcngaraargcnmgnytngcncargarwsngcnggngarathytnaarmgngcngargcngcnacngtnwsngcngargargcnmgnmgnatggcngaraaygcnmgn

SEQ ID NO: 882 - DNA, 285 bp, Artificial Sequence
  PCoil-CNA44
  misc_feature (3)..(3): n is a, c, g, or t
  misc_feature (9)..(9): n is a, c, g, or t
  misc_feature (18)..(18): n is a, c, g, or t
  misc_feature (21)..(21): n is a, c, g, or t
  misc_feature (24)..(24): n is a, c, g, or t
  misc_feature (27)..(27): n is a, c, g, or t
  misc_feature (30)..(30): n is a, c, g, or t
  misc_feature (33)..(33): n is a, c, g, or t
  misc_feature (39)..(39): n is a, c, g, or t
  misc_feature (42)..(42): n is a, c, g, or t
  misc_feature (45)..(45): n is a, c, g, or t
  misc_feature (51)..(51): n is a, c, g, or t
  misc_feature (54)..(54): n is a, c, g, or t
  misc_feature (60)..(60): n is a, c, g, or t
  misc_feature (63)..(63): n is a, c, g, or t
  misc_feature (66)..(66): n is a, c, g, or t
  misc_feature (69)..(69): n is a, c, g, or t
  misc_feature (75)..(75): n is a, c, g, or t
  misc_feature (78)..(78): n is a, c, g, or t
  misc_feature (84)..(84): n is a, c, g, or t
  misc_feature (87)..(87): n is a, c, g, or t
  misc_feature (96)..(96): n is a, c, g, or t
  misc_feature (99)..(99): n is a, c, g, or t
  misc_feature (105)..(105): n is a, c, g, or t
  misc_feature (108)..(108): n is a, c, g, or t
  misc_feature (114)..(114): n is a, c, g, or t
  misc_feature (117)..(117): n is a, c, g, or t
  misc_feature (120)..(120): n is a, c, g, or t
  misc_feature (123)..(123): n is a, c, g, or t
  misc_feature (126)..(126): n is a, c, g, or t
  misc_feature (129)..(129): n is a, c, g, or t
  misc_feature (135)..(135): n is a, c, g, or t
  misc_feature (144)..(144): n is a, c, g, or t
  misc_feature (147)..(147): n is a, c, g, or t
  misc_feature (150)..(150): n is a, c, g, or t
  misc_feature (153)..(153): n is a, c, g, or t
  misc_feature (159)..(159): n is a, c, g, or t
  misc_feature (168)..(168): n is a, c, g, or t
  misc_feature (171)..(171): n is a, c, g, or t
  misc_feature (180)..(180): n is a, c, g, or t
  misc_feature (186)..(186): n is a, c, g, or t
  misc_feature (189)..(189): n is a, c, g, or t
  misc_feature (192)..(192): n is a, c, g, or t
  misc_feature (195)..(195): n is a, c, g, or t
  misc_feature (198)..(198): n is a, c, g, or t
  misc_feature (207)..(207): n is a, c, g, or t
  misc_feature (210)..(210): n is a, c, g, or t
  misc_feature (213)..(213): n is a, c, g, or t
  misc_feature (219)..(219): n is a, c, g, or t
  misc_feature (222)..(222): n is a, c, g, or t
  misc_feature (228)..(228): n is a, c, g, or t
  misc_feature (231)..(231): n is a, c, g, or t
  misc_feature (237)..(237): n is a, c, g, or t
  misc_feature (240)..(240): n is a, c, g, or t
  misc_feature (243)..(243): n is a, c, g, or t
  misc_feature (246)..(246): n is a, c, g, or t
  misc_feature (249)..(249): n is a, c, g, or t
  misc_feature (252)..(252): n is a, c, g, or t
  misc_feature (261)..(261): n is a, c, g, or t
  misc_feature (264)..(264): n is a, c, g, or t
  misc_feature (267)..(267): n is a, c, g, or t
  misc_feature (273)..(273): n is a, c, g, or t
  misc_feature (282)..(282): n is a, c, g, or t
  misc_feature (285)..(285): n is a, c, g, or t
wsncarwsnaargarwsngcngcngcnwsngcnaaracngcnwsngarwsngcnaargcngcnacnwsnaargcnacngarwsngcncaraargcnwsngargcngcngargcngcnacnmgngcnggngarwsngaraargcngcngcngcngaygcnaargargcnmgncarcaygcngaracngcnmgngtngcncargargcngcnggngaygtnytnaarmgngcngargcngcnacngtnwsngcngargargcnmgnmgnatggcngaraaygcnmgn

SEQ ID NO: 883 - DNA, 273 bp, Artificial Sequence
  PCoil-CNA45
  misc_feature (3)..(3): n is a, c, g, or t
  misc_feature (6)..(6): n is a, c, g, or t
  misc_feature (9)..(9): n is a, c, g, or t
  misc_feature (12)..(12): n is a, c, g, or t
  misc_feature (18)..(18): n is a, c, g, or t
  misc_feature (21)..(21): n is a, c, g, or t
  misc_feature (27)..(27): n is a, c, g, or t
  misc_feature (30)..(30): n is a, c, g, or t
  misc_feature (36)..(36): n is a, c, g, or t
  misc_feature (39)..(39): n is a, c, g, or t
  misc_feature (42)..(42): n is a, c, g, or t
  misc_feature (45)..(45): n is a, c, g, or t
  misc_feature (48)..(48): n is a, c, g, or t
  misc_feature (51)..(51): n is a, c, g, or t
  misc_feature (54)..(54): n is a, c, g, or t
  misc_feature (60)..(60): n is a, c, g, or t
  misc_feature (63)..(63): n is a, c, g, or t
  misc_feature (66)..(66): n is a, c, g, or t
  misc_feature (69)..(69): n is a, c, g, or t
  misc_feature (72)..(72): n is a, c, g, or t
  misc_feature (75)..(75): n is a, c, g, or t
  misc_feature (78)..(78): n is a, c, g, or t
  misc_feature (81)..(81): n is a, c, g, or t
  misc_feature (84)..(84): n is a, c, g, or t
  misc_feature (93)..(93): n is a, c, g, or t
  misc_feature (105)..(105): n is a, c, g, or t
  misc_feature (114)..(114): n is a, c, g, or t
  misc_feature (120)..(120): n is a, c, g, or t
  misc_feature (123)..(123): n is a, c, g, or t
  misc_feature (126)..(126): n is a, c, g, or t
  misc_feature (129)..(129): n is a, c, g, or t
  misc_feature (135)..(135): n is a, c, g, or t
  misc_feature (138)..(138): n is a, c, g, or t
  misc_feature (141)..(141): n is a, c, g, or t
  misc_feature (144)..(144): n is a, c, g, or t
  misc_feature (147)..(147): n is a, c, g, or t
  misc_feature (156)..(156): n is a, c, g, or t
  misc_feature (159)..(159): n is a, c, g, or t
  misc_feature (168)..(168): n is a, c, g, or t
  misc_feature (177)..(177): n is a, c, g, or t
  misc_feature (183)..(183): n is a, c, g, or t
  misc_feature (186)..(186): n is a, c, g, or t
  misc_feature (192)..(192): n is a, c, g, or t
  misc_feature (195)..(195): n is a, c, g, or t
  misc_feature (198)..(198): n is a, c, g, or t
  misc_feature (207)..(207): n is a, c, g, or t
  misc_feature (210)..(210): n is a, c, g, or t
  misc_feature (216)..(216): n is a, c, g, or t
  misc_feature (219)..(219): n is a, c, g, or t
  misc_feature (225)..(225): n is a, c, g, or t
  misc_feature (228)..(228): n is a, c, g, or t
  misc_feature (231)..(231): n is a, c, g, or t
  misc_feature (234)..(234): n is a, c, g, or t
  misc_feature (237)..(237): n is a, c, g, or t
  misc_feature (240)..(240): n is a, c, g, or t
  misc_feature (249)..(249): n is a, c, g, or t
  misc_feature (252)..(252): n is a, c, g, or t
  misc_feature (255)..(255): n is a, c, g, or t
  misc_feature (261)..(261): n is a, c, g, or t
  misc_feature (270)..(270): n is a, c, g, or t
  misc_feature (273)..(273): n is a, c, g, or t
acnggnytnacncargcnmgngarwsngcngargcnwsngcnmgnwsngcnwsngarwsngcngcnacngcnacngcnmgngcngargaracngarcaraargcngargargcnaargcnwsngcnacnaaygcngcngcnwsngcngargargcnmgncarcaygcngaraaygcncarwsngcncargcnacngcngargaygtnytngarmgngcngargcngcngtngtnwsngcngargargcnmgnwsnatggcngaraaygcnmgn

SEQ ID NO: 884 - DNA, 735 bp, Artificial Sequence
  PCoil-CNA46
  misc_feature (3)..(3): n is a, c, g, or t
  misc_feature (6)..(6): n is a, c, g, or t
  misc_feature (9)..(9): n is a, c, g, or t
  misc_feature (12)..(12): n is a, c, g, or t
  misc_feature (15)..(15): n is a, c, g, or t
  misc_feature (21)..(21): n is a, c, g, or t
  misc_feature (27)..(27): n is a, c, g, or t
  misc_feature (30)..(30): n is a, c, g, or t
  misc_feature (33)..(33): n is a, c, g, or t
  misc_feature (39)..(39): n is a, c, g, or t
  misc_feature (42)..(42): n is a, c, g, or t
  misc_feature (45)..(45): n is a, c, g, or t
  misc_feature (48)..(48): n is a, c, g, or t
  misc_feature (51)..(51): n is a, c, g, or t
  misc_feature (57)..(57): n is a, c, g, or t
  misc_feature (63)..(63): n is a, c, g, or t
  misc_feature (66)..(66): n is a, c, g, or t
  misc_feature (72)..(72): n is a, c, g, or t
  misc_feature (84)..(84): n is a, c, g, or t
  misc_feature (96)..(96): n is a, c, g, or t
  misc_feature (99)..(99): n is a, c, g, or t
  misc_feature (105)..(105): n is a, c, g, or t
  misc_feature (114)..(114): n is a, c, g, or t
  misc_feature (117)..(117): n is a, c, g, or t
  misc_feature (120)..(120): n is a, c, g, or t
  misc_feature (126)..(126): n is a, c, g, or t
  misc_feature (129)..(129): n is a, c, g, or t
  misc_feature (135)..(135): n is a, c, g, or t
  misc_feature (138)..(138): n is a, c, g, or t
  misc_feature (141)..(141): n is a, c, g, or t
  misc_feature (144)..(144): n is a, c, g, or t
  misc_feature (147)..(147): n is a, c, g, or t
  misc_feature (150)..(150): n is a, c, g, or t
  misc_feature (153)..(153): n is a, c, g, or t
  misc_feature (156)..(156): n is a, c, g, or t
  misc_feature (159)..(159): n is a, c, g, or t
  misc_feature (162)..(162): n is a, c, g, or t
  misc_feature (165)..(165): n is a, c, g, or t
  misc_feature (168)..(168): n is a, c, g, or t
  misc_feature (171)..(171): n is a, c, g, or t
  misc_feature (180)..(180): n is a, c, g, or t
  misc_feature (183)..(183): n is a, c, g, or t
  misc_feature (186)..(186): n is a, c, g, or t
  misc_feature (189)..(189): n is a, c, g, or t
  misc_feature (195)..(195): n is a, c, g, or t
  misc_feature (198)..(198): n is a, c, g, or t
  misc_feature (201)..(201): n is a, c, g, or t
  misc_feature (204)..(204): n is a, c, g, or t
  misc_feature (210)..(210): n is a, c, g, or t
  misc_feature (213)..(213): n is a, c, g, or t
  misc_feature (219)..(219): n is a, c, g, or t
  misc_feature (225)..(225): n is a, c, g, or t
  misc_feature (228)..(228): n is a, c, g, or t
  misc_feature (231)..(231): n is a, c, g, or t
  misc_feature (240)..(240): n is a, c, g, or t
  misc_feature (243)..(243): n is a, c, g, or t
  misc_feature (246)..(246): n is a, c, g, or t
  misc_feature (252)..(252): n is a, c, g, or t
  misc_feature (255)..(255): n is a, c, g, or t
  misc_feature (258)..(258): n is a, c, g, or t
  misc_feature (261)..(261): n is a, c, g, or t
  misc_feature (273)..(273): n is a, c, g, or t
  misc_feature (276)..(276): n is a, c, g, or t
  misc_feature (282)..(282): n is a, c, g, or t
  misc_feature (285)..(285): n is a, c, g, or t
  misc_feature (288)..(288): n is a, c, g, or t
  misc_feature (291)..(291): n is a, c, g, or t
  misc_feature (294)..(294): n is a, c, g, or t
  misc_feature (297)..(297): n is a, c, g, or t
  misc_feature (300)..(300): n is a, c, g, or t
  misc_feature (303)..(303): n is a, c, g, or t
  misc_feature (312)..(312): n is a, c, g, or t
  misc_feature (315)..(315): n is a, c, g, or t
  misc_feature (318)..(318): n is a, c, g, or t
  misc_feature (324)..(324): n is a, c, g, or t
  misc_feature (327)..(327): n is a, c, g, or t
  misc_feature (330)..(330): n is a, c, g, or t
  misc_feature (336)..(336): n is a, c, g, or t
  misc_feature (342)..(342): n is a, c, g, or t
  misc_feature (345)..(345): n is a, c, g, or t
  misc_feature (354)..(354): n is a, c, g, or t
  misc_feature (357)..(357): n is a, c, g, or t
  misc_feature (360)..(360): n is a, c, g, or t
  misc_feature (363)..(363): n is a, c, g, or t
  misc_feature (375)..(375): n is a, c, g, or t
  misc_feature (378)..(378): n is a, c, g, or t
  misc_feature (381)..(381): n is a, c, g, or t
  misc_feature (384)..(384): n is a, c, g, or t
  misc_feature (393)..(393): n is a, c, g, or t
  misc_feature (399)..(399): n is a, c, g, or t
  misc_feature (402)..(402): n is a, c, g, or t
  misc_feature (408)..(408): n is a, c, g, or t
  misc_feature (411)..(411): n is a, c, g, or t
  misc_feature (414)..(414): n is a, c, g, or t
  misc_feature (420)..(420): n is a, c, g, or t
  misc_feature (423)..(423): n is a, c, g, or t
  misc_feature (426)..(426): n is a, c, g, or t
  misc_feature (429)..(429): n is a, c, g, or t
  misc_feature (432)..(432): n is a, c, g, or t
  misc_feature (435)..(435): n is a, c, g, or t
  misc_feature (441)..(441): n is a, c, g, or t
  misc_feature (444)..(444): n is a, c, g, or t
  misc_feature (450)..(450): n is a, c, g, or t
  misc_feature (453)..(453): n is a, c, g, or t
  misc_feature (456)..(456): n is a, c, g, or t
  misc_feature (462)..(462): n is a, c, g, or t
  misc_feature (465)..(465): n is a, c, g, or t
  misc_feature (471)..(471): n is a, c, g, or t
  misc_feature (474)..(474): n is a, c, g, or t
  misc_feature (477)..(477): n is a, c, g, or t
  misc_feature (483)..(483): n is a, c, g, or t
  misc_feature (486)..(486): n is a, c, g, or t
  misc_feature (489)..(489): n is a, c, g, or t
  misc_feature (495)..(495): n is a, c, g, or t
  misc_feature (498)..(498): n is a, c, g, or t
  misc_feature (504)..(504): n is a, c, g, or t
  misc_feature (510)..(510): n is a, c, g, or t
  misc_feature (516)..(516): n is a, c, g, or t
  misc_feature (519)..(519): n is a, c, g, or t
  misc_feature (525)..(525): n is a, c, g, or t
  misc_feature (531)..(531): n is a, c, g, or t
  misc_feature (534)..(534): n is a, c, g, or t
  misc_feature (537)..(537): n is a, c, g, or t
  misc_feature (540)..(540): n is a, c, g, or t
  misc_feature (546)..(546): n is a, c, g, or t
  misc_feature (549)..(549): n is a, c, g, or t
  misc_feature (552)..(552): n is a, c, g, or t
  misc_feature (555)..(555): n is a, c, g, or t
  misc_feature (570)..(570): n is a, c, g, or t
  misc_feature (573)..(573): n is a, c, g, or t
  misc_feature (582)..(582): n is a, c, g, or t
  misc_feature (585)..(585): n is a, c, g, or t
  misc_feature (600)..(600): n is a, c, g, or t
  misc_feature (603)..(603): n is a, c, g, or t
  misc_feature (615)..(615): n is a, c, g, or t
  misc_feature (618)..(618): n is a, c, g, or t
  misc_feature (624)..(624): n is a, c, g, or t
  misc_feature (627)..(627): n is a, c, g, or t
  misc_feature (633)..(633): n is a, c, g, or t
  misc_feature (639)..(639): n is a, c, g, or t
  misc_feature (642)..(642): n is a, c, g, or t
  misc_feature (645)..(645): n is a, c, g, or t
  misc_feature (654)..(654): n is a, c, g, or t
  misc_feature (657)..(657): n is a, c, g, or t
  misc_feature (660)..(660): n is a, c, g, or t
  misc_feature (666)..(666): n is a, c, g, or t
  misc_feature (675)..(675): n is a, c, g, or t
  misc_feature (678)..(678): n is a, c, g, or t
  misc_feature (684)..(684): n is a, c, g, or t
  misc_feature (687)..(687): n is a, c, g, or t
  misc_feature (696)..(696): n is a, c, g, or t
  misc_feature (699)..(699): n is a, c, g, or t
  misc_feature (705)..(705): n is a, c, g, or t
  misc_feature (708)..(708): n is a, c, g, or t
  misc_feature (717)..(717): n is a, c, g, or t
  misc_feature (726)..(726): n is a, c, g, or t
  misc_feature (729)..(729): n is a, c, g, or t
gtnmgnacngcngcngaygcnaargcnwsngcngarwsngcngcnmgnwsngargcngaygcngcngaywsngaraaraargcngarcarttygcnmgnaayytncargaygcngtngcnaargcnggngaywsngcnwsngcngcngcnytnwsngcngcnggngcnggngarcargcnacngcngcnaarwsngcngcnytngargcngcngaywsnaargcngcnacngaraargcngcnwsnaaygcngcnytnwsngaraaraaygcngcngaywsngcnytngcngcnmgnacnwsngaraaywsngcngcngaywsngcnacnaargcngaygcnwsngaraargcngcngtnytntaygarcaracnwsnwsnacncaygaracnaaygcnggncarwsngcngcngaygcngcnytnwsngcnacnaargcngcngaywsngcnytnaaygcnggnaarwsngcnacngargcngcnggntaygcnacngaygcncaracncargcnggnaaygcnaarmgngcngcnacngaygcnacnacngcnaargaygarathgtnmgncarathwsnggnttygaygarcaygtnwsncarcargaracngtnathacngcnaarggncaracnytngtngaycargcnmgnacngargcnathaaygcnggncargcngcncarcaygcngcncargtnytngargaygcnathaaygcnwsnathaar

SEQ ID NO: 885 - DNA, 228 bp, Escherichia coli
cagattcgctttcgcctgggcccgggcaacattattgaaaccaacagcaacggctggtttccggataccgatggcgcgctgattaccggcctgacctttctggatccgaaagatgcgacccgcgtgcagggcttttttcagcatctgcaggtgcgctttggcgatggcccgtggcaggatgtgaaaggcctggatgaagtgggcagcgataccggccgcaccggcgaa

SEQ ID NO: 886 - DNA, 228 bp, Escherichia coli
cagattcgctttcgcatgggcccgggcaacattattgaaaccaacagcaacggctggtttccggataccgatggcgcgctgattaccggcctgacctttctggatccgaaagatgcgacccgcgtgcagggcttttttcagcatctgcaggtgcgctttggcgatggcccgtggcaggatgtgaaaggcctggatgaagtgggcagcgataccggccgcaccggcgaa

SEQ ID NO: 887 - DNA, 228 bp, Escherichia coli
cagattcgctttcgcctgggcccgggcaacattattgaaaccaacagcaacggctggtttccgggcaccgatggcgcgctgattaccggcctgacctttctggatccgaaagatgcgacccgcgtgcagggcttttttcagcatctgcaggtgcgctttggcgatggcccgtggcaggatgtgaaaggcctggatgaagtgggcagcgataccggccgcaccggcgaa

SEQ ID NO: 888 - DNA, 228 bp, Escherichia coli
cagattcgctttcgcctgggcccgggcaacattattgaaaccaacagccatggctggtttccggataccgatggcgcgctgattaccggcctgacctttctggatccgaaagatgcgacccgcgtgcagggcttttttcagcatctgcaggtgcgctttggcgatggcccgtggcaggatgtgaaaggcctggatgaagtgggcagcgataccggccgcaccggcgaa

SEQ ID NO: 889 - DNA, 228 bp, Escherichia coli
cagattcgctttcgcctgggcccgggcaacattattgaaaccaacagccatggctggtttccggataccgatggcgcgctgattaccggcctgacctttctggatccgaaagatgcgacccgcgtgcaggtgttttttcagcatctgcaggtgcgctttggcgatggcccgtggcaggatgtgaaaggcctggatgaagtgggcagcgataccggccgcaccggcgaa

SEQ ID NO: 890 - DNA, 228 bp, Escherichia coli
cagattcgctttcgcctgggcccgggcaacattattgaaaccaacagccatggctggtttccggataccgatggcgcgctgattaccggcctgacctttctggatccgaaagataccacccgcgtgcagggcttttttcagcatctgcaggtgcgctttggcgatggcccgtggcaggatgtgaaaggcctggatgaagtgggcagcgataccggccgcaccggcgaa

SEQ ID NO: 891 - DNA, 228 bp, Escherichia coli
cagattcgctttcgcctgggcccgggcaacattattgaaaccaacagccatggctggtttccggataccgatggcgcgctgattaccggcctgacctttctggatccgaaagataccacccgcgtgcagggcttttttcgccatctgcaggtgcgctttggcgatggcccgtggcaggatgtgaaaggcctggatgaagtgggcagcgataccggccgcaccggcgaa

SEQ ID NO: 892 - DNA, 228 bp, Escherichia coli
cagattcgctttcgcctgggcccgggcaacattattgaaaccaacagccatggctggtttccggataccgatggcgcgctgattaccggcctgacctttctggcgccgaaagatgcgacccgcgtgcagggcttttttcagcatctgcaggtgcgctttggcgatggcccgtggcaggatgtgaaaggcctggatgaagtgggcagcgataccggccgcaccggcgaa

SEQ ID NO: 893 - DNA, 228 bp, Escherichia coli
cagattcgctttcgcctgggcccgggcaacattattgaaaccaacagcaacggctggtttccggataccgatggcgcgctgattaccggcctgacctttctggcgccgaaagatgcgacccgcgtgcagggcttttttcagcatctgcaggtgcgctttggcgatggcccgtggcaggatgtgaaaggcctggatgaagtgggcagcgataccggccgcaccggcgaa

SEQ ID NO: 894 - DNA, 228 bp, Escherichia coli
cagattcgctttcgcctgggcccgggcaacattattgaaaccaacagcaacggctggtttccggataccgatggcgcgctgattaccggcctgacctttctggcgccgaaagatgcgacccgcgtgcaggtgttttttcagcatctgcaggtgcgctttggcgatggcccgtggcaggatgtgaaaggcctggatgaagtgggcagcgataccggccgcaccggcgaa

SEQ ID NO: 895 - DNA, 228 bp, Escherichia coli
cagattcgctttcgcctgggcccgggcaacattattgaaaccaacagcaacggctggtttccggataccgatggcgcgctgattaccggcctgacctttctggcgccgaaagataccacccgcgtgcagggcttttttcagcatctgcaggtgcgctttggcgatggcccgtggcaggatgtgaaaggcctggatgaagtgggcagcgataccggccgcaccggcgaa

SEQ ID NO: 896 - DNA, 228 bp, Escherichia coli
cagattcgctttcgcctgggcccggcgagcattattgaaaccaacagccatggctggtttccgggcaccgatggcgcgctgattaccggcctgacctttctggcgccgaaagatgcgacccgcgtgcaggtgttttttcagcatctgcaggtgcgctttggcgatggcccgtggcaggatgtgaaaggcctggatgaagtgggcagcgataccggccgcaccggcgaa

SEQ ID NO: 897 - DNA, 228 bp, Escherichia coli
cagattcgctttcgcctgggcccggcgagcattattgaaaccaacagccatggctggtttccgggcaccgatggcgcgctgattaccggcctgacctttctggcgccgaaagataccacccgcgtgcagggcttttttcagcatctgcaggtgcgctttggcgatggcccgtggcaggatgtgaaaggcctggatgaagtgggcagcgataccggccgcaccggcgaa

SEQ ID NO: 898 - DNA, 228 bp, Escherichia coli
cagattcgctttcgcctgggcccggcgagcattattgaaaccaacagccatggctggtttccggataccgatggcgcgctgattaccggcctgacctttctggatccgaaagatgcgacccgcgtgcagggcttttttcagcatctgcaggtgcgctttggcgatggcccgtggcaggatgtgaaaggcctggatgaagtgggcagcgataccggccgcaccggcgaa

SEQ ID NO: 899 - DNA, 228 bp, Escherichia coli
cagattcgctttcgcctgggcccggcgagcattattgaaaccaacagcaacggctggtttccggataccgatggcgcgctgattaccggcctgacctttctggatccgaaagatgcgacccgcgtgcagggcttttttcagcatctgcaggtgcgctttggcgatggcccgtggcaggatgtgaaaggcctggatgaagtgggcagcgataccggccgcaccggcgaa

SEQ ID NO: 900 - DNA, 228 bp, Escherichia coli
cagattcgctttcgcctgggcccgggcaacattattgaaaccaacagcaacggctggtttccggataccgatggcgcgctgattaccggcctgacctttctggatccgaaagatgcgacccgcgtgcagggcctgtttcagcatctgcaggtgcgctttggcgatggcccgtggcaggatgtgaaaggcctggatgaagtgggcagcgataccggccgcaccggcgaa

SEQ ID NO: 901 - DNA, 228 bp, Escherichia coli
cagattcgctttcgcctgggcccggcgagcattattgaaaccaacagcaacggctggtttccggataccgatggcgcgctgattaccggcctgacctttctggatccgaaagatgcgacccaggtgcagggcctgtttcgccatctgcaggtgcgctttggcgatggcccgtggcaggatgtgaaaggcctggatgaagtgggcagcgataccggccgcaccggcgaa

SEQ ID NO: 902 - DNA, 228 bp, Escherichia coli
cagattcgctttcgcctgggcccggcgagcattattgaaaccaacagccatggctggtttccggataccgatggcgcgctgattaccggcctgacctttctggatccgaaagatgcgacccaggtgcagggcctgtttcgccatctgcaggtgcgctttggcgatggcccgtggcaggatgtgaaaggcctggatgaagtgggcagcgataccggccgcaccggcgaa

SEQ ID NO: 903 - DNA, 228 bp, Escherichia coli
cagattcgctttcgcctgggcccggcgagcattattgaaaccaacagcaacggctggtttccggataccgatggcgcgctgattaccggcctgacctttctggatccgaaagatgcgacccaggtgcagggcctgtttcagcatctgcaggtgcgctttggcgatggcccgtggcaggatgtgaaaggcctggatgaagtgggcagcgataccggccgcaccggcgaa

SEQ ID NO: 904 - DNA, 228 bp, Escherichia coli
cagattcgctttcgcctgggcccggcgagcattattgaaaccaacagcaacggctggtttccggataccgatggcgcgctgattaccggcctgacctttctggatccgaaagatgcgacccaggtgcagggcctgtttcagcatctgcaggtgcgctttggcgatggcccgtggcaggatgtgaaaggcctggatgaagtgggcagcgataccggcagcagcggcgaa

SEQ ID NO: 905 - DNA, 228 bp, Escherichia coli
cagattcgctttcgcctgggcccggcgagcattattgaaaccaacagcaacggctggtttccggataccgatggcgcgctgattaccggcctgacctttctggatccgaaagatgcgacccaggtgcagggcctgtttcagcatctgcaggtgcgctttggcgatggcccgtggcaggatgtgaaaggcctgaacgaagtgggcagcgataccggccgcaccggcgaa

SEQ ID NO: 906 - DNA, 228 bp, Escherichia coli
cagattcgctttcgcctgggcccgatgcgcattattgaaaccaacagctatggctggtttccgggcaccgatggcgcgctgattaccggcctgacctttctggatccgaaagatgcgacccaggtgcagggcatgtttcagcatctgcaggtgcgctttggcgatggcccgtggcaggatgtgaaaggcctggatgaagtgggcagcgataccggccgcaccggcgaa

SEQ ID NO: 907 - DNA, 228 bp, Escherichia coli
cagattcgctttcgcctgggcccggcgagcattattgaaaccaacagctatggctggtttccgggcaccgatggcgcgctgattaccggcctgacctttctggatccgaaagatgcgacccaggtgcagggcatgtttcagcatctgcaggtgcgctttggcgatggcccgtggcaggatgtgaaaggcctggatgaagtgggcagcgataccggccgcaccggcgaa

SEQ ID NO: 908 - DNA, 228 bp, Escherichia coli
cagattcgctttcgcctgggcccggcgagcattattgaaaccaacagcaacggctggtttccgggcaccgatggcgcgctgattaccggcctgacctttctggatccgaaagatgcgacccaggtgcagggcatgtttcagcatctgcaggtgcgctttggcgatggcccgtggcaggatgtgaaaggcctggatgaagtgggcagcgataccggccgcaccggcgaa

SEQ ID NO: 909 - DNA, 228 bp, Escherichia coli
cagattcgctttcgcctgggcccggcgagcattattgaaaccaacagcaacggctggtttccgggcaccgatggcgcgctgattaccggcctgacctttctggatccgaaagatgcgacccaggtgcagggcctgtttcagcatctgcaggtgcgctttggcgatggcccgtggcaggatgtgaaaggcctggatgaagtgggcagcgataccggccgcaccggcgaa

SEQ ID NO: 910 - DNA, 228 bp, Escherichia coli
cagattcgctttcgcctgggcccggcgagcattattgaaaccaacagcaacggctggtttccgggcaccgatggcgcgctgattaccggcctgacctttctggatccgaaagatgcgacccaggtgcagggcttttttcagcatctgcaggtgcgctttggcgatggcccgtggcaggatgtgaaaggcctggatgaagtgggcagcgataccggccgcaccggcgaa

SEQ ID NO: 911 - DNA, 228 bp, Escherichia coli
cagattcgctttcgcctgggcccgggcaacattattgaaaccaacagcaacggctggtttccggataccgatggcgcgctgattaccggcctgacctttctggatccgaaagatgcgacccaggtgcagggcctgtttcgccatctgcaggtgcgctttggcgatggcccgtggcaggatgtgaaaggcctgaacgaagtgggcagcgataccggccgcaccggcgaa

SEQ ID NO: 912 - DNA, 228 bp, Escherichia coli
cagattcgctttcgcctgggcccgggcaacattattgaaaccaacagcaacggctggtttccggataccgatggcgcgctgattaccggcctgacctttctggatccgaaagataccacccaggtgcagggcctgtttcgccatctgcaggtgcgctttggcgatggcccgtggcaggatgtgaaaggcctgaacgaagtgggcagcgataccggccgcaccggcgaa

SEQ ID NO: 913 - DNA, 228 bp, Escherichia coli
cagattcgctttcgcctgggcccgggcaacattattgaaaccaacagccatggctggtttccggataccgatggcgcgctgattaccggcctgacctttctggatccgaaagatgcgacccaggtgcagggcctgtttcgccatctgcaggtgcgctttggcgatggcccgtggcaggatgtgaaaggcctgaacgaagtgggcagcgataccggccgcaccggcgaa

SEQ ID NO: 914 - DNA, 228 bp, Escherichia coli
cagattcgctttcgcctgggcccgggcaacattattgaaaccaacagcaacggctggtttccggataccgatggcgcgctgattaccggcctgacctttctggatccgaaagatgcgacccaggtgcagggcctgtttcgccatctgcaggtgcgctttggcgatggcccgtggcaggatgtgaaaggcctggatgaagtgggcagcgataccggccgcaccggcgaa

SEQ ID NO: 915 - DNA, 201 bp, Escherichia coli
gtgcagagcctgaccgcgcagctgcgcctgggcccggcggatattctggaaagcgatgaaaacggcattattccggaacaggatcgcgtgattacccaggtggtgattctggatgcggataaaaaacagattcagtgcgtggtgcgcccgctgcagattctgcgcgcggatggccgctgggaaaacattggcggcatgaaa

SEQ ID NO: 916 - DNA, 201 bp, Escherichia coli
gtgcagagcctgaccgcgcagctgcgcctgggcccggcggatattctggaaagcgatgaaaacggcattattccggaacaggcgcgcgtgattacccaggtggtgattctggatgcggataaaaaacagattcagtgcgtggtgcgcccgctgcagattctgcgcgcggatggccgctgggaaaacattggcggcatgaaa

SEQ ID NO: 917 - DNA, 201 bp, Escherichia coli
gtgcagagcccgaccgcgcagctgcgcctgggcccggcggatattctggaaagcgatgaaaacggcattattccggaacaggcgcgcgtgattacccaggtggtgattctggatgcggataaaaaacagattcagtgcgtggtgcgcccgctgcagattctgcgcgcggatggcacctgggaaaacattggcggcatgaaa

SEQ ID NO: 918 - DNA, 201 bp, Escherichia coli
gtgcagagcccgaccgcgcagctgcgcctgggcccggcggatattctggaaagcgatgaaaacagcattattccggaacaggcgcgcgtgattacccaggtggtgattctggatgcggataaaaaacagattcagtgcgtggtgcgcccgctgcagattctgcgcgcggatggcacctgggaaaacattggcggcatgaaa

SEQ ID NO: 919 - DNA, 201 bp, Escherichia coli
gtgcagagcccgaccgcgcagctgcgcctgggcccggcggatattctggaaagcgatgaaaacggcattattccggaacaggcgcgcgtgattacccaggtggtgattctggatgcggataaaaaacagattcagtgcgtggtgcgcccgctgcagattctgcgcgcggatggcacctgggaaaacattggctggatgaaa

SEQ ID NO: 920 - DNA, 201 bp, Escherichia coli
gtgcagagcccgaccgcgcagctgcgcctgggcccggcggatattctggaaagcgatgaaaacggcattattccggaacaggatcgcgtgattacccaggtggtgattctggatgcggataaaaaacagattcagtgcgtggtgcgcccgctgcagattctgcgcgcggatggcacctgggaaaacattggcggcatgaaa

SEQ ID NO: 921 - DNA, 201 bp, Escherichia coli
gtgcagagcctgaccgcgcagctgcgcctgggcccggcggatattctggaaagcgatgaaaacggcattattccggaacaggatcgcgtgattacccaggtggtgattctggatgcggataaaaaacagattcagtgcgtggtgcgcccgctgcagattctgcgcgcggatggcacctgggaaaacattggcggcatgaaa

SEQ ID NO: 922 - DNA, 201 bp, Escherichia coli
gtgcagagcctgaccgcgcagctgcgcctgggcccggcggatattctggaaagcgatgaaaacggcattattccggaacaggatcgcgtgattacccaggtggtgattctggatgcggataaaaaacagattcagtgcgtggtgcgcccgctgcagattctgcgcggcgatggcacctgggaaaacattggcggcatgaaa

SEQ ID NO: 923 - DNA, 201 bp, Escherichia coli
gtgcagagcctgaccgcgcagctgcgcctgggcccggcggatattctggaaagcgatgaaaacggcattattccggaacaggatcgcgtgattacccaggtggtgattctggataccgataaaaaactgattcagtgcgtggtgcgcccgctgcagattctgcgcgcggatggcacctgggaaaacattggcggcatgaaa

SEQ ID NO: 924 - DNA, 201 bp, Escherichia coli
gtgcagagcctgaccgcgcagctgcgcctgggcccggcggatattctggaaagcgatgaaaacggcattattccggaacaggatcgcgtgattacccaggtggtgattctggatgcggataaaaaacagattcagtgcgtggtgcgcccgctgcagattctgcgcgcggatggcacctgggaaaacgtgggcggcatgaaa

SEQ ID NO: 925 - DNA, 201 bp, Escherichia coli
gtgcagagcctgaccgcgcagctgcgcctgggcccggcggatattctggaaagcgatgaaaacggcattattccggaacaggatcgcgtgattacccaggtggtgattctggatgcggataaaaaacagattcagtgcgtggtgcgcccgctgcagattctgcgcgcggatggcacctgggaaaacattggcgaaatgaaa

SEQ ID NO: 926 - DNA, 201 bp, Escherichia coli
ggccagagcctgaccgcgcagctgcgcctgggcccggcggatattctggaaagcgatgaaaacggcattattccggaacaggcgcgcgtgattacccaggtggtgattctggatgcggataaaaaacagattcagtgcgtggtgcgcccgctgcagattctgcgcgcggatggcacctgggaaaacattggcggcatgaaa

SEQ ID NO: 927 - DNA, 201 bp, Escherichia coli
ggccagagcctgaccgcgcagctgcgcctgggcccggcggatattctggaaagcgatgaaaacggcattattccggaacaggatcgcgtgattacccaggtggtgattctggatgcggataaaaaacagattcagtgcgtggtgcgcccgctgcagattctgcgcgcggatggcacctgggaaaacattggcggcatgaaa

SEQ ID NO: 928 - DNA, 201 bp, Escherichia coli
ggccagagcctgaccgtgcagctgcgcctgggcccggcggatattctggaaagcgatgaaaacggcattattccggaacaggatcgcgtgattacccaggtggtgattctggatgcggataaaaaacagattcagtgcgtggtgcgcccgctgcagattctgcgcgcggatggcacctgggaaaacattggcggcatgaaa

SEQ ID NO: 929 - DNA, 201 bp, Escherichia coli
ggccagagcctgaccgtgcagctgcgcctgggcccggcggatattctggaaagcgatgaaagcggcattattccggaacaggatcgcgtgattacccaggtggtgattctggatgcggataaaaaacagattcagtgcgtggtgcgcccgctgcagattctgcgcgcggatggcacctgggaaaacattggcggcatgaaa

SEQ ID NO: 930 - DNA, 201 bp, Escherichia coli
ggccagagcctgaccgtgcagctgcgcctgggcccggcggatattctggaaagcgatgaaaacggcattattccggaacaggtgcgcgtgattacccaggtggtgattctggatgcggataaaaaacagattcagtgcgtggtgcgcccgctgcagattctgcgcgcggatggcacctgggaaaacattggcggcatgaaa

SEQ ID NO: 931 - DNA, 201 bp, Escherichia coli
ggccagagcctgaccgtgcagctgcgcctgggcccggcggatattctggaaagcgatgaaaacggcattattccggaacaggatggcgtgattacccaggtggtgattctggatgcggataaaaaacagattcagtgcgtggtgcgcccgctgcagattctgcgcgcggatggccgctgggaaaacattggcggcatgaaa

SEQ ID NO: 932 - DNA, 201 bp, Escherichia coli
ggccagagcctgaccgtgcagctgcgcctgggcccggcggatattctggaaagcgatgaaaacggcattattccggaacaggatcgcgtgattacccaggtggtgattctggatgcggataaaaaacagattcagtgcatggtgcgcccgctgcagattctgcgcgcggatggccgctgggaaaacattggcggcatgaaa

SEQ ID NO: 933 - DNA, 201 bp, Escherichia coli
ggccagagcctgaccgcgcagctgcgcctgggcccggcggatattctggaaagcgatgaaaacggcattattccggaacaggatcgcgtgattacccaggtggtgattctggatgcggataaaaaacagattcagtgcgtggtgcgcccgctgcagattctgcgcgcggatggccgctgggaaaacattggcggcatgaaa

SEQ ID NO: 934 - DNA, 201 bp, Escherichia coli
ggcgaactgctgaccgcgcagctgcgcctgggcccggcggatattctggaaagcgatgaaaacggcattattccggaacaggcgcgcgtgattacccaggtggtgattctggatgcggataaaaaacagattcagtgcgtggtgcgcccgctgcagattctgcgcgcggatggcacctgggaaaacattggcggcatgaaa

SEQ ID NO: 935 - DNA, 201 bp, Escherichia coli
ggcgaactgctgaccgcgcagctgcgcctgggcccggcggatattctggaaagcgatgaaaacggcattattccggaacaggcgcgcgtgattacccaggtggtgattctggataccgataaaaaacagattcagtgcgtggtgcgcccgctgcagattctgcgcgcggatggcacctgggaaaacattggcggcatgaaa

SEQ ID NO: 936 - DNA, 201 bp, Escherichia coli
ggcgaactgctgaccgcgcagctgcgcctgggcccggcggatattctggaaagcgatgaaaacggcattattccggaacaggatcgcgtgattacccaggtggtgattctggatgcggataaaaaacagattcagtgcgtggtgcgcccgctgcagattctgcgcgcggatggcacctgggaaaacattggcggcatgaaa

SEQ ID NO: 937 - DNA, 201 bp, Escherichia coli
ggcgaactgctgaccgcgcagctgcgcctgggcccggcggatattctggaaagcgatgaaaacggcattattccggaacaggatcgcgtgattacccaggtggtgattctggatgcggataaaaaacagattcagtgcgtggtgcgcccgctgcagattctgcgcgcggatggccgctgggaaaacattggcggcatgaaa

SEQ ID NO: 938 - DNA, 201 bp, Escherichia coli
ggcgaactgctgaccgcgcagctgcgcctgggcccggcggatattctggaaagcgatgaaaacggcattattccggaacaggatcgcgtgattacccaggtggtgattctggatgcggataaaaaacagattcagtgcgtggtgcgcccgctgcagattctgcgcgcggatggcgtgtgggaaaacgtgggcggcatgaaa

SEQ ID NO: 939 - DNA, 201 bp, Escherichia coli
ggcggcctgctgaccgcgcagctgcgcctgggcccggcggatattctggaaagcgatgaaaacggcattattccggaacaggatcgcgtgattacccaggtggtgattctggatgcggataaaaaacagattcagtgcgtggtgcgcccgctgcagattctgcgcgcggatggcacctgggaaaacattggcggcatgaaa

SEQ ID NO: 940 - DNA, 201 bp, Escherichia coli
ggcggcctgctgaccgcgcagctgcgcctgggcccggcggatattctggaaagcgatgaaaacggcattattccggaacaggatcgcgtgattacccaggtggtgattctggatgcggataaaaaacagattcagtgcgtggtgcgcccgctgcagattctgcgcgcggatggccgctgggaaaacattggcggcatgaaa

SEQ ID NO: 941 - DNA, 201 bp, Escherichia coli
ggccgcagcctgaccgcgcagctgcgcctgggcccggcggatattctggaaagcgatgaaaacggcattattccggaacaggatcgcgtgattacccaggtggtgattctggatgcggataaaaaacagattcagtgcgtggtgcgcccgctgcagattctgcgcgcggatggcacctgggaaaacattggcggcatgaaa

SEQ ID NO: 942 - DNA, 276 bp, Escherichia coli
gtgccgggcgaaatttatagcattggcacctatattattgcggcgctgggcccgtatattaccgatattggccgcacctatcagccgggcgaaaccgtgagcggcagccgcctgaaacgctgcgcgctgattaaagatgaaaacggcaactatatgaaagcgaacaccgatggcattgatggcaacctgagcagcgtgccgggcagctggatggtgtgcaacgaaattaccagcaccaacgataacgaaggcattggcctgtttcagcgcgcgtat

SEQ ID NO: 943 - DNA, 276 bp, Escherichia coli
gtgccgggcgaaatttatagcattggcacctatattattgcggcgctgggcccgtatattaccgatattggccgcacctatcagccgggcgaaaccgtgagcggcagccgcctgaaacgctgcgcgctgattaaagatgaaaacggcaactatatgaaagcgaacaccgatggcattgatggcattctgagcagcgtgccgggcagctggatggtgtgcaacgaaattaccagcaccaacgataacgaaagcattggcctgtttcagcgcgcgtat

SEQ ID NO: 944 - DNA, 276 bp, Escherichia coli
gtgccgggcgaaatttatagcattggcacctatattattgcggcgctggcgccgtataccaccgatattggccgcacctatcagccgggcgaaaccgtgcagggcagccgcctgaaacgctgcgcgattattaaagatgcgagcggcaactatatgaaagcgaacaccgatggcattgatggcaacctgagcagcgtgccgggcagctggatggtgtgcaacgaaattaccagcaccaacgataacgaaggcattggcctgtttcagcgcgcgtat

SEQ ID NO: 945 - DNA, 282 bp, Escherichia coli
agcaccgaaaaatatgcggtgggcagctttctgtttggcagcattagcaccctggaaagcgaaagcgcgattaaagaaaacattaacggcgaaaaaattaccgaagtggcgattctgtatcgcgtgggcgtgacctatagcccgacctttagcattgtgcataacgcgggcaacagcattccgggcacctggcgcgcgtttgtgagcgcgctgagcctgggcgcgccgggctatgatgaacagaccatgaccaccaacctgaccctgtttcagcgcattgtg

SEQ ID NO: 946 - DNA, 228 bp, Artificial Sequence
  PfC-CNA01
  misc_feature (9)..(9): n is a, c, g, or t
  misc_feature (15)..(15): n is a, c, g, or t
  misc_feature (18)..(18): n is a, c, g, or t
  misc_feature (21)..(21): n is a, c, g, or t
  misc_feature (24)..(24): n is a, c, g, or t
  misc_feature (27)..(27): n is a, c, g, or t
  misc_feature (42)..(42): n is a, c, g, or t
  misc_feature (48)..(48): n is a, c, g, or t
  misc_feature (54)..(54): n is a, c, g, or t
  misc_feature (63)..(63): n is a, c, g, or t
  misc_feature (69)..(69): n is a, c, g, or t
  misc_feature (75)..(75): n is a, c, g, or t
  misc_feature (78)..(78): n is a, c, g, or t
  misc_feature (81)..(81): n is a, c, g, or t
  misc_feature (87)..(87): n is a, c, g, or t
  misc_feature (90)..(90): n is a, c, g, or t
  misc_feature (93)..(93): n is a, c, g, or t
  misc_feature (96)..(96): n is a, c, g, or t
  misc_feature (102)..(102): n is a, c, g, or t
  misc_feature (108)..(108): n is a, c, g, or t
  misc_feature (117)..(117): n is a, c, g, or t
  misc_feature (120)..(120): n is a, c, g, or t
  misc_feature (123)..(123): n is a, c, g, or t
  misc_feature (126)..(126): n is a, c, g, or t
  misc_feature (132)..(132): n is a, c, g, or t
  misc_feature (147)..(147): n is a, c, g, or t
  misc_feature (153)..(153): n is a, c, g, or t
  misc_feature (156)..(156): n is a, c, g, or t
  misc_feature (162)..(162): n is a, c, g, or t
  misc_feature (168)..(168): n is a, c, g, or t
  misc_feature (171)..(171): n is a, c, g, or t
  misc_feature (183)..(183): n is a, c, g, or t
  misc_feature (189)..(189): n is a, c, g, or t
  misc_feature (192)..(192): n is a, c, g, or t
  misc_feature (201)..(201): n is a, c, g, or t
  misc_feature (204)..(204): n is a, c, g, or t
  misc_feature (207)..(207): n is a, c, g, or t
  misc_feature (213)..(213): n is a, c, g, or t
  misc_feature (216)..(216): n is a, c, g, or t
  misc_feature (219)..(219): n is a, c, g, or t
  misc_feature (222)..(222): n is a, c, g, or t
  misc_feature (225)..(225): n is a, c, g, or t
carathmgnttymgnytnggnccnggnaayathathgaracnaaywsnaayggntggttyccngayacngayggngcnytnathacnggnytnacnttyytngayccnaargaygcnacnmgngtncarggnttyttycarcayytncargtnmgnttyggngayggnccntggcargaygtnaarggnytngaygargtnggnwsngayacnggnmgnacnggngar

SEQ ID NO: 947 - DNA, 228 bp, Artificial Sequence
  PfC-CNA02
  misc_feature (9)..(9): n is a, c, g, or t
  misc_feature (15)..(15): n is a, c, g, or t
  misc_feature (21)..(21): n is a, c, g, or t
  misc_feature (24)..(24): n is a, c, g, or t
  misc_feature (27)..(27): n is a, c, g, or t
  misc_feature (42)..(42): n is a, c, g, or t
  misc_feature (48)..(48): n is a, c, g, or t
  misc_feature (54)..(54): n is a, c, g, or t
  misc_feature (63)..(63): n is a, c, g, or t
  misc_feature (69)..(69): n is a, c, g, or t
  misc_feature (75)..(75): n is a, c, g, or t
  misc_feature (78)..(78): n is a, c, g, or t
  misc_feature (81)..(81): n is a, c, g, or t
  misc_feature (87)..(87): n is a, c, g, or t
  misc_feature (90)..(90): n is a, c, g, or t
  misc_feature (93)..(93): n is a, c, g, or t
  misc_feature (96)..(96): n is a, c, g, or t
  misc_feature (102)..(102): n is a, c, g, or t
  misc_feature (108)..(108): n is a, c, g, or t
  misc_feature (117)..(117): n is a, c, g, or t
  misc_feature (120)..(120): n is a, c, g, or t
  misc_feature (123)..(123): n is a, c, g, or t
  misc_feature (126)..(126): n is a, c, g, or t
  misc_feature (132)..(132): n is a, c, g, or t
  misc_feature (147)..(147): n is a, c, g, or t
  misc_feature (153)..(153): n is a, c, g, or t
  misc_feature (156)..(156): n is a, c, g, or t
  misc_feature (162)..(162): n is a, c, g, or t
  misc_feature (168)..(168): n is a, c, g, or t
  misc_feature (171)..(171): n is a, c, g, or t
  misc_feature (183)..(183): n is a, c, g, or t
  misc_feature (189)..(189): n is a, c, g, or t
  misc_feature (192)..(192): n is a, c, g, or t
  misc_feature (201)..(201): n is a, c, g, or t
  misc_feature (204)..(204): n is a, c, g, or t
  misc_feature (207)..(207): n is a, c, g, or t
  misc_feature (213)..(213): n is a, c, g, or t
  misc_feature (216)..(216): n is a, c, g, or t
  misc_feature (219)..(219): n is a, c, g, or t
  misc_feature (222)..(222): n is a, c, g, or t
  misc_feature (225)..(225): n is a, c, g, or t
carathmgnttymgnatgggnccnggnaayathathgaracnaaywsnaayggntggttyccngayacngayggngcnytnathacnggnytnacnttyytngayccnaargaygcnacnmgngtncarggnttyttycarcayytncargtnmgnttyggngayggnccntggcargaygtnaarggnytngaygargtnggnwsngayacnggnmgnacnggngar

SEQ ID NO: 948 - DNA, 228 bp, Artificial Sequence
  PfC-CNA03
  misc_feature (9)..(9): n is a, c, g, or t
  misc_feature (15)..(15): n is a, c, g, or t
  misc_feature (18)..(18): n is a, c, g, or t
  misc_feature (21)..(21): n is a, c, g, or t
  misc_feature (24)..(24): n is a, c, g, or t
  misc_feature (27)..(27): n is a, c, g, or t
  misc_feature (42)..(42): n is a, c, g, or t
  misc_feature (48)..(48): n is a, c, g, or t
  misc_feature (54)..(54): n is a, c, g, or t
  misc_feature (63)..(63): n is a, c, g, or t
  misc_feature (66)..(66): n is a, c, g, or t
  misc_feature (69)..(69): n is a, c, g, or t
  misc_feature (75)..(75): n is a, c, g, or t
  misc_feature (78)..(78): n is a, c, g, or t
  misc_feature (81)..(81): n is a, c, g, or t
  misc_feature (87)..(87): n is a, c, g, or t
  misc_feature (90)..(90): n is a, c, g, or t
  misc_feature (93)..(93): n is a, c, g, or t
  misc_feature (96)..(96): n is a, c, g, or t
  misc_feature (102)..(102): n is a, c, g, or t
  misc_feature (108)..(108): n is a, c, g, or t
  misc_feature (117)..(117): n is a, c, g, or t
  misc_feature (120)..(120): n is a, c, g, or t
  misc_feature (123)..(123): n is a, c, g, or t
  misc_feature (126)..(126): n is a, c, g, or t
  misc_feature (132)..(132): n is a, c, g, or t
  misc_feature (147)..(147): n is a, c, g, or t
  misc_feature (153)..(153): n is a, c, g, or t
  misc_feature (156)..(156): n is a, c, g, or t
  misc_feature (162)..(162): n is a, c, g, or t
  misc_feature (168)..(168): n is a, c, g, or t
  misc_feature (171)..(171): n is a, c, g, or t
  misc_feature (183)..(183): n is a, c, g, or t
  misc_feature (189)..(189): n is a, c, g, or t
  misc_feature (192)..(192): n is a, c, g, or t
  misc_feature (201)..(201): n is a, c, g, or t
  misc_feature (204)..(204): n is a, c, g, or t
  misc_feature (207)..(207): n is a, c, g, or t
  misc_feature (213)..(213): n is a, c, g, or t
  misc_feature (216)..(216): n is a, c, g, or t
  misc_feature (219)..(219): n is a, c, g, or t
  misc_feature (222)..(222): n is a, c, g, or t
  misc_feature (225)..(225): n is a, c, g, or t
carathmgnttymgnytnggnccnggnaayathathgaracnaaywsnaayggntggttyccnggnacngayggngcnytnathacnggnytnacnttyytngayccnaargaygcnacnmgngtncarggnttyttycarcayytncargtnmgnttyggngayggnccntggcargaygtnaarggnytngaygargtnggnwsngayacnggnmgnacnggngar

SEQ ID NO: 949 - DNA, 228 bp, Artificial Sequence
  PfC-CNA04
  misc_feature (9)..(9): n is a, c, g, or t
  misc_feature (15)..(15): n is a, c, g, or t
  misc_feature (18)..(18): n is a, c, g, or t
  misc_feature (21)..(21): n is a, c, g, or t
  misc_feature (24)..(24): n is a, c, g, or t
  misc_feature (27)..(27): n is a, c, g, or t
  misc_feature (42)..(42): n is a, c, g, or t
  misc_feature (48)..(48): n is a, c, g, or t
  misc_feature (54)..(54): n is a, c, g, or t
  misc_feature (63)..(63): n is a, c, g, or t
  misc_feature (69)..(69): n is a, c, g, or t
  misc_feature (75)..(75): n is a, c, g, or t
  misc_feature (78)..(78): n is a, c, g, or t
  misc_feature (81)..(81): n is a, c, g, or t
  misc_feature (87)..(87): n is a, c, g, or t
  misc_feature (90)..(90): n is a, c, g, or t
  misc_feature (93)..(93): n is a, c, g, or t
  misc_feature (96)..(96): n is a, c, g, or t
  misc_feature (102)..(102): n is a, c, g, or t
  misc_feature (108)..(108): n is a, c, g, or t
  misc_feature (117)..(117): n is a, c, g, or t
  misc_feature (120)..(120): n is a, c, g, or t
  misc_feature (123)..(123): n is a, c, g, or t
  misc_feature (126)..(126): n is a, c, g, or t
  misc_feature (132)..(132): n is a, c, g, or t
  misc_feature (147)..(147): n is a, c, g, or t
  misc_feature (153)..(153): n is a, c, g, or t
  misc_feature (156)..(156): n is a, c, g, or t
  misc_feature (162)..(162): n is a, c, g, or t
  misc_feature (168)..(168): n is a, c, g, or t
  misc_feature (171)..(171): n is a, c, g, or t
  misc_feature (183)..(183): n is a, c, g, or t
  misc_feature (189)..(189): n is a, c, g, or t
  misc_feature (192)..(192): n is a, c, g, or t
  misc_feature (201)..(201): n is a, c, g, or t
  misc_feature (204)..(204): n is a, c, g, or t
  misc_feature (207)..(207): n is a, c, g, or t
  misc_feature (213)..(213): n is a, c, g, or t
  misc_feature (216)..(216): n is a, c, g, or t
  misc_feature (219)..(219): n is a, c, g, or t
  misc_feature (222)..(222): n is a, c, g, or t
  misc_feature (225)..(225): n is a, c, g, or t
carathmgnttymgnytnggnccnggnaayathathgaracnaaywsncayggntggttyccngayacngayggngcnytnathacnggnytnacnttyytngayccnaargaygcnacnmgngtncarggnttyttycarcayytncargtnmgnttyggngayggnccntggcargaygtnaarggnytngaygargtnggnwsngayacnggnmgnacnggngar

SEQ ID NO: 950 - DNA, 228 bp, Artificial Sequence
  PfC-CNA05
  misc_feature (9)..(9): n is a, c, g, or t
  misc_feature (15)..(15): n is a, c, g, or t
  misc_feature (18)..(18): n is a, c, g, or t
  misc_feature (21)..(21): n is a, c, g, or t
  misc_feature (24)..(24): n is a, c, g, or t
  misc_feature (27)..(27): n is a, c, g, or t
  misc_feature (42)..(42): n is a, c, g, or t
  misc_feature (48)..(48): n is a, c, g, or t
  misc_feature (54)..(54): n is a, c, g, or t
  misc_feature (63)..(63): n is a, c, g, or t
  misc_feature (69)..(69): n is a, c, g, or t
  misc_feature (75)..(75): n is a, c, g, or t
  misc_feature (78)..(78): n is a, c, g, or t
  misc_feature (81)..(81): n is a, c, g, or t
  misc_feature (87)..(87): n is a, c, g, or t
  misc_feature (90)..(90): n is a, c, g, or t
  misc_feature (93)..(93): n is a, c, g, or t
  misc_feature (96)..(96): n is a, c, g, or t
  misc_feature (102)..(102): n is a, c, g, or t
  misc_feature (108)..(108): n is a, c, g, or t
  misc_feature (117)..(117): n is a, c, g, or t
  misc_feature (120)..(120): n is a, c, g, or t
  misc_feature (123)..(123): n is a, c, g, or t
  misc_feature (126)..(126): n is a, c, g, or t
  misc_feature (132)..(132): n is a, c, g, or t
  misc_feature (147)..(147): n is a, c, g, or t
  misc_feature (153)..(153): n is a, c, g, or t
  misc_feature (156)..(156): n is a, c, g, or t
  misc_feature (162)..(162): n is a, c, g, or t
  misc_feature (168)..(168): n is a, c, g, or t
  misc_feature (171)..(171): n is a, c, g, or t
  misc_feature (183)..(183): n is a, c, g, or t
  misc_feature (189)..(189): n is a, c, g, or t
  misc_feature (192)..(192): n is a, c, g, or t
  misc_feature (201)..(201): n is a, c, g, or t
  misc_feature (204)..(204): n is a, c, g, or t
  misc_feature (207)..(207): n is a, c, g, or t
  misc_feature (213)..(213): n is a, c, g, or t
  misc_feature (216)..(216): n is a, c, g, or t
  misc_feature (219)..(219): n is a, c, g, or t
  misc_feature (222)..(222): n is a, c, g, or t
  misc_feature (225)..(225): n is a, c, g, or t
carathmgnttymgnytnggnccnggnaayathathgaracnaaywsncayggntggttyccngayacngayggngcnytnathacnggnytnacnttyytngayccnaargaygcnacnmgngtncargtnttyttycarcayytncargtnmgnttyggngayggnccntggcargaygtnaarggnytngaygargtnggnwsngayacnggnmgnacnggngar

SEQ ID NO: 951 - DNA, 228 bp, Artificial Sequence
  PfC-CNA06
  misc_feature (9)..(9): n is a, c, g, or t
  misc_feature (15)..(15): n is a, c, g, or t
  misc_feature (18)..(18): n is a, c, g, or t
  misc_feature (21)..(21): n is a, c, g, or t
  misc_feature (24)..(24): n is a, c, g, or t
  misc_feature (27)..(27): n is a, c, g, or t
  misc_feature (42)..(42): n is a, c, g, or t
  misc_feature (48)..(48): n is a, c, g, or t
  misc_feature (54)..(54): n is a, c, g, or t
  misc_feature (63)..(63): n is a, c, g, or t
  misc_feature (69)..(69): n is a, c, g, or t
  misc_feature (75)..(75): n is a, c, g, or t
  misc_feature (78)..(78): n is a, c, g, or t
  misc_feature (81)..(81): n is a, c, g, or t
  misc_feature (87)..(87): n is a, c, g, or t
  misc_feature (90)..(90): n is a, c, g, or t
  misc_feature (93)..(93): n is a, c, g, or t
  misc_feature (96)..(96): n is a, c, g, or t
  misc_feature (102)..(102): n is a, c, g, or t
  misc_feature (108)..(108): n is a, c, g, or t
  misc_feature (117)..(117): n is a, c, g, or t
  misc_feature (120)..(120): n is a, c, g, or t
  misc_feature (123)..(123): n is a, c, g, or t
  misc_feature (126)..(126): n is a, c, g, or t
  misc_feature (132)..(132): n is a, c, g, or t
  misc_feature (147)..(147): n is a, c, g, or t
  misc_feature (153)..(153): n is a, c, g, or t
  misc_feature (156)..(156): n is a, c, g, or t
  misc_feature (162)..(162): n is a, c, g, or t
  misc_feature (168)..(168): n is a, c, g, or t
  misc_feature (171)..(171): n is a, c, g, or t
  misc_feature (183)..(183): n is a, c, g, or t
  misc_feature (189)..(189): n is a, c, g, or t
  misc_feature (192)..(192): n is a, c, g, or t
  misc_feature (201)..(201): n is a, c, g, or t
  misc_feature (204)..(204): n is a, c, g, or t
  misc_feature (207)..(207): n is a, c, g, or t
  misc_feature (213)..(213): n is a, c, g, or t
  misc_feature (216)..(216): n is a, c, g, or t
  misc_feature (219)..(219): n is a, c, g, or t
  misc_feature (222)..(222): n is a, c, g, or t
  misc_feature (225)..(225): n is a, c, g, or t
carathmgnttymgnytnggnccnggnaayathathgaracnaaywsncayggntggttyccngayacngayggngcnytnathacnggnytnacnttyytngayccnaargayacnacnmgngtncarggnttyttycarcayytncargtnmgnttyggngayggnccntggcargaygtnaarggnytngaygargtnggnwsngayacnggnmgnacnggngar

SEQ ID NO: 952 - DNA, 228 bp, Artificial Sequence
  PfC-CNA07
  misc_feature (9)..(9): n is a, c, g, or t
  misc_feature (15)..(15): n is a, c, g, or t
  misc_feature (18)..(18): n is a, c, g, or t
  misc_feature (21)..(21): n is a, c, g, or t
  misc_feature (24)..(24): n is a, c, g, or t
  misc_feature (27)..(27): n is a, c, g, or t
  misc_feature (42)..(42): n is a, c, g, or t
  misc_feature (48)..(48): n is a, c, g, or t
  misc_feature (54)..(54): n is a, c, g, or t
  misc_feature (63)..(63): n is a, c, g, or t
  misc_feature (69)..(69): n is a, c, g, or t
  misc_feature (75)..(75): n is a, c, g, or t
  misc_feature (78)..(78): n is a, c, g, or t
  misc_feature (81)..(81): n is a, c, g, or t
  misc_feature (87)..(87): n is a, c, g, or t
  misc_feature (90)..(90): n is a, c, g, or t
  misc_feature (93)..(93): n is a, c, g, or t
  misc_feature (96)..(96): n is a, c, g, or t
  misc_feature (102)..(102): n is a, c, g, or t
  misc_feature (108)..(108): n is a, c, g, or t
  misc_feature (117)..(117): n is a, c, g, or t
  misc_feature (120)..(120): n is a, c, g, or t
  misc_feature (123)..(123): n is a, c, g, or t
  misc_feature (126)..(126): n is a, c, g, or t
  misc_feature (132)..(132): n is a, c, g, or t
  misc_feature (141)..(141): n is a, c, g, or t
  misc_feature (147)..(147): n is a, c, g, or t
  misc_feature (153)..(153): n is a, c, g, or t
  misc_feature (156)..(156): n is a, c, g, or t
  misc_feature (162)..(162): n is a, c, g, or t
  misc_feature (168)..(168): n is a, c, g, or t
  misc_feature (171)..(171): n is a, c, g, or t
  misc_feature (183)..(183): n is a, c, g, or t
  misc_feature (189)..(189): n is a, c, g, or t
  misc_feature (192)..(192): n is a, c, g, or t
  misc_feature (201)..(201): n is a, c, g, or t
  misc_feature (204)..(204): n is a, c, g, or t
  misc_feature (207)..(207): n is a, c, g, or t
  misc_feature (213)..(213): n is a, c, g, or t
  misc_feature (216)..(216): n is a, c, g, or t
  misc_feature (219)..(219): n is a, c, g, or t
  misc_feature (222)..(222): n is a, c, g, or t
  misc_feature (225)..(225): n is a, c, g, or t
carathmgnttymgnytnggnccnggnaayathathgaracnaaywsncayggntggttyccngayacngayggngcnytnathacnggnytnacnttyytngayccnaargayacnacnmgngtncarggnttyttymgncayytncargtnmgnttyggngayggnccntggcargaygtnaarggnytngaygargtnggnwsngayacnggnmgnacnggngar

SEQ ID NO: 953 - DNA, 228 bp, Artificial Sequence
  PfC-CNA08
  misc_feature (9)..(9): n is a, c, g, or t
  misc_feature (15)..(15): n is a, c, g, or t
  misc_feature (18)..(18): n is a, c, g, or t
  misc_feature (21)..(21): n is a, c, g, or t
  misc_feature (24)..(24): n is a, c, g, or t
  misc_feature (27)..(27): n is a, c, g, or t
  misc_feature (42)..(42): n is a, c, g, or t
  misc_feature (48)..(48): n is a, c, g, or t
  misc_feature (54)..(54): n is a, c, g, or t
  misc_feature (63)..(63): n is a, c, g, or t
  misc_feature (69)..(69): n is a, c, g, or t
  misc_feature (75)..(75): n is a, c, g, or t
  misc_feature (78)..(78): n is a, c, g, or t
  misc_feature (81)..(81): n is a, c, g, or t
  misc_feature (87)..(87): n is a, c, g, or t
  misc_feature (90)..(90): n is a, c, g, or t
  misc_feature (93)..(93): n is a, c, g, or t
  misc_feature (96)..(96): n is a, c, g, or t
  misc_feature (102)..(102): n is a, c, g, or t
  misc_feature (105)..(105): n is a, c, g, or t
  misc_feature (108)..(108): n is a, c, g, or t
  misc_feature (117)..(117): n is a, c, g, or t
  misc_feature (120)..(120): n is a, c, g, or t
  misc_feature (123)..(123): n is a, c, g, or t
  misc_feature (126)..(126): n is a, c, g, or t
  misc_feature (132)..(132): n is a, c, g, or t
  misc_feature (147)..(147): n is a, c, g, or t
  misc_feature (153)..(153): n is a, c, g, or t
  misc_feature (156)..(156): n is a, c, g, or t
  misc_feature (162)..(162): n is a, c, g, or t
  misc_feature (168)..(168): n is a, c, g, or t
  misc_feature (171)..(171): n is a, c, g, or t
  misc_feature (183)..(183): n is a, c, g, or t
  misc_feature (189)..(189): n is a, c, g, or t
  misc_feature (192)..(192): n is a, c, g, or t
  misc_feature (201)..(201): n is a, c, g, or t
  misc_feature (204)..(204): n is a, c, g, or t
  misc_feature (207)..(207): n is a, c, g, or t
  misc_feature (213)..(213): n is a, c, g, or t
  misc_feature (216)..(216): n is a, c, g, or t
  misc_feature (219)..(219): n is a, c, g, or t
  misc_feature (222)..(222): n is a, c, g, or t
  misc_feature (225)..(225): n is a, c, g, or t
carathmgnttymgnytnggnccnggnaayathathgaracnaaywsncayggntggttyccngayacngayggngcnytnathacnggnytnacnttyytngcnccnaargaygcnacnmgngtncarggnttyttycarcayytncargtnmgnttyggngayggnccntggcargaygtnaarggnytngaygargtnggnwsngayacnggnmgnacnggngar

SEQ ID NO: 954 - DNA, 228 bp, Artificial Sequence
  PfC-CNA09
  misc_feature (9)..(9): n is a, c, g, or t
  misc_feature (15)..(15): n is a, c, g, or t
  misc_feature (18)..(18): n is a, c, g, or t
  misc_feature (21)..(21): n is a, c, g, or t
  misc_feature (24)..(24): n is a, c, g, or t
  misc_feature (27)..(27): n is a, c, g, or t
  misc_feature (42)..(42): n is a, c, g, or t
  misc_feature (48)..(48): n is a, c, g, or t
  misc_feature (54)..(54): n is a, c, g, or t
  misc_feature (63)..(63): n is a, c, g, or t
  misc_feature (69)..(69): n is a, c, g, or t
  misc_feature (75)..(75): n is a, c, g, or t
  misc_feature (78)..(78): n is a, c, g, or t
  misc_feature (81)..(81): n is a, c, g, or t
  misc_feature (87)..(87): n is a, c, g, or t
  misc_feature (90)..(90): n is a, c, g, or t
  misc_feature (93)..(93): n is a, c, g, or t
  misc_feature (96)..(96): n is a, c, g, or t
  misc_feature (102)..(102): n is a, c, g, or t
  misc_feature (105)..(105): n is a, c, g, or t
  misc_feature (108)..(108): n is a, c, g, or t
  misc_feature (117)..(117): n is a, c, g, or t
  misc_feature (120)..(120): n is a, c, g, or t
  misc_feature (123)..(123): n is a, c, g, or t
  misc_feature (126)..(126): n is a, c, g, or t
  misc_feature (132)..(132): n is a, c, g, or t
  misc_feature (147)..(147): n is a, c, g, or t
  misc_feature (153)..(153): n is a, c, g, or t
  misc_feature (156)..(156): n is a, c, g, or t
  misc_feature (162)..(162): n is a, c, g, or t
  misc_feature (168)..(168): n is a, c, g, or t
  misc_feature (171)..(171): n is a, c, g, or t
  misc_feature (183)..(183): n is a, c, g, or t
  misc_feature (189)..(189): n is a, c, g, or t
  misc_feature (192)..(192): n is a, c, g, or t
  misc_feature (201)..(201): n is a, c, g, or t
  misc_feature (204)..(204): n is a, c, g, or t
  misc_feature (207)..(207): n is a, c, g, or t
  misc_feature (213)..(213): n is a, c, g, or t
  misc_feature (216)..(216): n is a, c, g, or t
  misc_feature (219)..(219): n is a, c, g, or t
  misc_feature (222)..(222): n is a, c, g, or t
  misc_feature (225)..(225): n is a, c, g, or t
carathmgnttymgnytnggnccnggnaayathathgaracnaaywsnaayggntggttyccngayacngayggngcnytnathacnggnytnacnttyytngcnccnaargaygcnacnmgngtncarggnttyttycarcayytncargtnmgnttyggngayggnccntggcargaygtnaarggnytngaygargtnggnwsngayacnggnmgnacnggngar

SEQ ID NO: 955 - DNA, 228 bp, Artificial Sequence
  PfC-CNA10
  misc_feature (9)..(9): n is a, c, g, or t
  misc_feature (15)..(15): n is a, c, g, or t
  misc_feature (18)..(18): n is a, c, g, or t
  misc_feature (21)..(21): n is a, c, g, or t
  misc_feature (24)..(24): n is a, c, g, or t
  misc_feature (27)..(27): n is a, c, g, or t
  misc_feature (42)..(42): n is a, c, g, or t
  misc_feature (48)..(48): n is a, c, g, or t
  misc_feature (54)..(54): n is a, c, g, or t
  misc_feature (63)..(63): n is a, c, g, or t
  misc_feature (69)..(69): n is a, c, g, or t
  misc_feature (75)..(75): n is a, c, g, or t
  misc_feature (78)..(78): n is a, c, g, or t
  misc_feature (81)..(81): n is a, c, g, or t
  misc_feature (87)..(87): n is a, c, g, or t
  misc_feature (90)..(90): n is a, c, g, or t
  misc_feature (93)..(93): n is a, c, g, or t
  misc_feature (96)..(96): n is a, c, g, or t
  misc_feature (102)..(102): n is a, c, g, or t
  misc_feature (105)..(105): n is a, c, g, or t
  misc_feature (108)..(108): n is a, c, g, or t
  misc_feature (117)..(117): n is a, c, g, or t
  misc_feature (120)..(120): n is a, c, g, or t
  misc_feature (123)..(123): n is a, c, g, or t
  misc_feature (126)..(126): n is a, c, g, or t
  misc_feature (132)..(132): n is a, c, g, or t
  misc_feature (147)..(147): n is a, c, g, or t
  misc_feature (153)..(153): n is a, c, g, or t
  misc_feature (156)..(156): n is a, c, g, or t
  misc_feature (162)..(162): n is a, c, g, or t
  misc_feature (168)..(168): n is a, c, g, or t
  misc_feature (171)..(171): n is a, c, g, or t
  misc_feature (183)..(183): n is a, c, g, or t
  misc_feature (189)..(189): n is a, c, g, or t
  misc_feature (192)..(192): n is a, c, g, or t
  misc_feature (201)..(201): n is a, c, g, or t
  misc_feature (204)..(204): n is a, c, g, or t
  misc_feature (207)..(207): n is a, c, g, or t
  misc_feature (213)..(213): n is a, c, g, or t
  misc_feature (216)..(216): n is a, c, g, or t
  misc_feature (219)..(219): n is a, c, g, or t
  misc_feature (222)..(222): n is a, c, g, or t
  misc_feature (225)..(225): n is a, c, g, or t
carathmgnttymgnytnggnccnggnaayathathgaracnaaywsnaayggntggttyccngayacngayggngcnytnathacnggnytnacnttyytngcnccnaargaygcnacnmgngtncargtnttyttycarcayytncargtnmgnttyggngayggnccntggcargaygtnaarggnytngaygargtnggnwsngayacnggnmgnacnggngar

SEQ ID NO: 956 - DNA, 228 bp, Artificial Sequence
  PfC-CNA11
  misc_feature (9)..(9): n is a, c, g, or t
  misc_feature (15)..(15): n is a, c, g, or t
  misc_feature (18)..(18): n is a, c, g, or t
  misc_feature (21)..(21): n is a, c, g, or t
  misc_feature (24)..(24): n is a, c, g, or t
  misc_feature (27)..(27): n is a, c, g, or t
  misc_feature (42)..(42): n is a, c, g, or t
  misc_feature (48)..(48): n is a, c, g, or t
  misc_feature (54)..(54): n is a, c, g, or t
  misc_feature (63)..(63): n is a, c, g, or t
  misc_feature (69)..(69): n is a, c, g, or t
  misc_feature (75)..(75): n is a, c, g, or t
  misc_feature (78)..(78): n is a, c, g, or t
  misc_feature (81)..(81): n is a, c, g, or t
  misc_feature (87)..(87): n is a, c, g, or t
  misc_feature (90)..(90): n is a, c, g, or t
  misc_feature (93)..(93): n is a, c, g, or t
  misc_feature (96)..(96): n is a, c, g, or t
  misc_feature (102)..(102): n is a, c, g, or t
  misc_feature (105)..(105): n is a, c, g, or t
  misc_feature (108)..(108): n is a, c, g, or t
  misc_feature (117)..(117): n is a, c, g, or t
  misc_feature (120)..(120): n is a, c, g, or t
  misc_feature (123)..(123): n is a, c, g, or t
  misc_feature (126)..(126): n is a, c, g, or t
  misc_feature (132)..(132): n is a, c, g, or t
  misc_feature (147)..(147): n is a, c, g, or t
  misc_feature (153)..(153): n is a, c, g, or t
  misc_feature (156)..(156): n is a, c, g, or t
  misc_feature (162)..(162): n is a, c, g, or t
  misc_feature (168)..(168): n is a, c, g, or t
  misc_feature (171)..(171): n is a, c, g, or t
  misc_feature (183)..(183): n is a, c, g, or t
  misc_feature (189)..(189): n is a, c, g, or t
  misc_feature (192)..(192): n is a, c, g, or t
  misc_feature (201)..(201): n is a, c, g, or t
  misc_feature (204)..(204): n is a, c, g, or t
  misc_feature (207)..(207): n is a, c, g, or t
  misc_feature (213)..(213): n is a, c, g, or t
  misc_feature (216)..(216): n is a, c, g, or t
  misc_feature (219)..(219): n is a, c, g, or t
  misc_feature (222)..(222): n is a, c, g, or t
  misc_feature (225)..(225): n is a, c, g, or t
carathmgnttymgnytnggnccnggnaayathathgaracnaaywsnaayggntggttyccngayacngayggngcnytnathacnggnytnacnttyytngcnccnaargayacnacnmgngtncarggnttyttycarcayytncargtnmgnttyggngayggnccntggcargaygtnaarggnytngaygargtnggnwsngayacnggnmgnacnggngar

SEQ ID NO: 957 - DNA, 228 bp, Artificial Sequence
  PfC-CNA12
  misc_feature (9)..(9): n is a, c, g, or t
  misc_feature (15)..(15): n is a, c, g, or t
  misc_feature (18)..(18): n is a, c, g, or t
  misc_feature (21)..(21): n is a, c, g, or t
  misc_feature (24)..(24): n is a, c, g, or t
  misc_feature (27)..(27): n is a, c, g, or t
  misc_feature (30)..(30): n is a, c, g, or t
  misc_feature (42)..(42): n is a, c, g, or t
  misc_feature (48)..(48): n is a, c, g, or t
  misc_feature (54)..(54): n is a, c, g, or t
  misc_feature (63)..(63): n is a, c, g, or t
  misc_feature (66)..(66): n is a, c, g, or t
  misc_feature (69)..(69): n is a, c, g, or t
  misc_feature (75)..(75): n is a, c, g, or t
  misc_feature (78)..(78): n is a, c, g, or t
  misc_feature (81)..(81): n is a, c, g, or t
  misc_feature (87)..(87): n is a, c, g, or t
  misc_feature (90)..(90): n is a, c, g, or t
  misc_feature (93)..(93): n is a, c, g, or t
  misc_feature (96)..(96): n is a, c, g, or t
  misc_feature (102)..(102): n is a, c, g, or t
  misc_feature (105)..(105): n is a, c, g, or t
  misc_feature (108)..(108): n is a, c, g, or t
  misc_feature (117)..(117): n is a, c, g, or t
  misc_feature (120)..(120): n is a, c, g, or t
  misc_feature (123)..(123): n is a, c, g, or t
  misc_feature (126)..(126): n is a, c, g, or t
  misc_feature (132)..(132): n is a, c, g, or t
  misc_feature (147)..(147): n is a, c, g, or t
  misc_feature (153)..(153): n is a, c, g, or t
  misc_feature (156)..(156): n is a, c, g, or t
  misc_feature (162)..(162): n is a, c, g, or t
  misc_feature (168)..(168): n is a, c, g, or t
  misc_feature (171)..(171): n is a, c, g, or t
  misc_feature (183)..(183): n is a, c, g, or t
  misc_feature (189)..(189): n is a, c, g, or t
  misc_feature (192)..(192): n is a, c, g, or t
  misc_feature (201)..(201): n is a, c, g, or t
  misc_feature (204)..(204): n is a, c, g, or t
  misc_feature (207)..(207): n is a, c, g, or t
  misc_feature (213)..(213): n is a, c, g, or t
  misc_feature (216)..(216): n is a, c, g, or t
  misc_feature (219)..(219): n is a, c, g, or t
  misc_feature (222)..(222): n is a, c, g, or t
  misc_feature (225)..(225): n is a, c, g, or t
carathmgnttymgnytnggnccngcnwsnathathgaracnaaywsncayggntggttyccnggnacngayggngcnytnathacnggnytnacnttyytngcnccnaargaygcnacnmgngtncargtnttyttycarcayytncargtnmgnttyggngayggnccntggcargaygtnaarggnytngaygargtnggnwsngayacnggnmgnacnggngar

SEQ ID NO: 958 - DNA, 228 bp, Artificial Sequence
  PfC-CNA13
  misc_feature (9)..(9): n is a, c, g, or t
  misc_feature (15)..(15): n is a, c, g, or t
  misc_feature (18)..(18): n is a, c, g, or t
  misc_feature (21)..(21): n is a, c, g, or t
  misc_feature (24)..(24): n is a, c, g, or t
  misc_feature (27)..(27): n is a, c, g, or t
  misc_feature (30)..(30): n is a, c, g, or t
  misc_feature (42)..(42): n is a, c, g, or t
  misc_feature (48)..(48): n is a, c, g, or t
  misc_feature (54)..(54): n is a, c, g, or t
  misc_feature (63)..(63): n is a, c, g, or t
  misc_feature (66)..(66): n is a, c, g, or t
  misc_feature (69)..(69): n is a, c, g, or t
  misc_feature (75)..(75): n is a, c, g, or t
  misc_feature (78)..(78): n is a, c, g, or t
  misc_feature (81)..(81): n is a, c, g, or t
  misc_feature (87)..(87): n is a, c, g, or t
  misc_feature (90)..(90): n is a, c, g, or t
  misc_feature (93)..(93): n is a, c, g, or t
  misc_feature (96)..(96): n is a, c, g, or t
  misc_feature (102)..(102): n is a, c, g, or t
  misc_feature (105)..(105): n is a, c, g, or t
  misc_feature (108)..(108): n is a, c, g, or t
  misc_feature (117)..(117): n is a, c, g, or t
  misc_feature (120)..(120): n is a, c, g, or t
  misc_feature (123)..(123): n is a, c, g, or t
  misc_feature (126)..(126): n is a, c, g, or t
  misc_feature (132)..(132): n is a, c, g, or t
  misc_feature (147)..(147): n is a, c, g, or t
  misc_feature (153)..(153): n is a, c, g, or t
  misc_feature (156)..(156): n is a, c, g, or t
  misc_feature (162)..(162): n is a, c, g, or t
  misc_feature (168)..(168): n is a, c, g, or t
  misc_feature (171)..(171): n is a, c, g, or t
  misc_feature (183)..(183): n is a, c, g, or t
  misc_feature (189)..(189): n is a, c, g, or t
  misc_feature (192)..(192): n is a, c, g, or t
  misc_feature (201)..(201): n is a, c, g, or t
  misc_feature (204)..(204): n is a, c, g, or t
  misc_feature (207)..(207): n is a, c, g, or t
  misc_feature (213)..(213): n is a, c, g, or t
  misc_feature (216)..(216): n is a, c, g, or t
  misc_feature (219)..(219): n is a, c, g, or t
  misc_feature (222)..(222): n is a, c, g, or t
  misc_feature (225)..(225): n is a, c, g, or t
carathmgnttymgnytnggnccngcnwsnathathgaracnaaywsncayggntggttyccnggnacngayggngcnytnathacnggnytnacnttyytngcnccnaargayacnacnmgngtncarggnttyttycarcayytncargtnmgnttyggngayggnccntggcargaygtnaarggnytngaygargtnggnwsngayacnggnmgnacnggngar

SEQ ID NO: 959 - DNA, 228 bp, Artificial Sequence
  PfC-CNA14
  misc_feature (9)..(9): n is a, c, g, or t
  misc_feature (15)..(15): n is a, c, g, or t
  misc_feature (18)..(18): n is a, c, g, or t
  misc_feature (21)..(21): n is a, c, g, or t
  misc_feature (24)..(24): n is a, c, g, or t
  misc_feature (27)..(27): n is a, c, g, or t
  misc_feature (30)..(30): n is a, c, g, or t
  misc_feature (42)..(42): n is a, c, g, or t
  misc_feature (48)..(48): n is a, c, g, or t
  misc_feature (54)..(54): n is a, c, g, or t
  misc_feature (63)..(63): n is a, c, g, or t
  misc_feature (69)..(69): n is a, c, g, or t
  misc_feature (75)..(75): n is a, c, g, or t
  misc_feature (78)..(78): n is a, c, g, or t
  misc_feature (81)..(81): n is a, c, g, or t
  misc_feature (87)..(87): n is a, c, g, or t
  misc_feature (90)..(90): n is a, c, g, or t
  misc_feature (93)..(93): n is a, c, g, or t
  misc_feature (96)..(96): n is a, c, g, or t
  misc_feature (102)..(102): n is a, c, g, or t
  misc_feature (108)..(108): n is a, c, g, or t
  misc_feature (117)..(117): n is a, c, g, or t
  misc_feature (120)..(120): n is a, c, g, or t
  misc_feature (123)..(123): n is a, c, g, or t
  misc_feature (126)..(126): n is a, c, g, or t
  misc_feature (132)..(132): n is a, c, g, or t
  misc_feature (147)..(147): n is a, c, g, or t
  misc_feature (153)..(153): n is a, c, g, or t
  misc_feature (156)..(156): n is a, c, g, or t
  misc_feature (162)..(162): n is a, c, g, or t
  misc_feature (168)..(168): n is a, c, g, or t
  misc_feature (171)..(171): n is a, c, g, or t
  misc_feature (183)..(183): n is a, c, g, or t
  misc_feature (189)..(189): n is a, c, g, or t
  misc_feature (192)..(192): n is a, c, g, or t
  misc_feature (201)..(201): n is a, c, g, or t
  misc_feature (204)..(204): n is a, c, g, or t
  misc_feature (207)..(207): n is a, c, g, or t
  misc_feature (213)..(213): n is a, c, g, or t
  misc_feature (216)..(216): n is a, c, g, or t
  misc_feature (219)..(219): n is a, c, g, or t
  misc_feature (222)..(222): n is a, c, g, or t
  misc_feature (225)..(225): n is a, c, g, or t
carathmgnttymgnytnggnccngcnwsnathathgaracnaaywsncayggntggttyccngayacngayggngcnytnathacnggnytnacnttyytngayccnaargaygcnacnmgngtncarggnttyttycarcayytncargtnmgnttyggngayggnccntggcargaygtnaarggnytngaygargtnggnwsngayacnggnmgnacnggngar

SEQ ID NO: 960 - DNA, 228 bp, Artificial Sequence
  PfC-CNA15
  misc_feature (9)..(9): n is a, c, g, or t
  misc_feature (15)..(15): n is a, c, g, or t
  misc_feature (18)..(18): n is a, c, g, or t
  misc_feature (21)..(21): n is a, c, g, or t
  misc_feature (24)..(24): n is a, c, g, or t
  misc_feature (27)..(27): n is a, c, g, or t
  misc_feature (30)..(30): n is a, c, g, or t
  misc_feature (42)..(42): n is a, c, g, or t
  misc_feature (48)..(48): n is a, c, g, or t
  misc_feature (54)..(54): n is a, c, g, or t
  misc_feature (63)..(63): n is a, c, g, or t
  misc_feature (69)..(69): n is a, c, g, or t
  misc_feature (75)..(75): n is a, c, g, or t
  misc_feature (78)..(78): n is a, c, g, or t
  misc_feature (81)..(81): n is a, c, g, or t
  misc_feature (87)..(87): n is a, c, g, or t
  misc_feature (90)..(90): n is a, c, g, or t
  misc_feature (93)..(93): n is a, c, g, or t
  misc_feature (96)..(96): n is a, c, g, or t
  misc_feature (102)..(102): n is a, c, g, or t
  misc_feature (108)..(108): n is a, c, g, or t
  misc_feature (117)..(117): n is a, c, g, or t
  misc_feature (120)..(120): n is a, c, g, or t
  misc_feature (123)..(123): n is a, c, g, or t
  misc_feature (126)..(126): n is a, c, g, or t
  misc_feature (132)..(132): n is a, c, g, or t
  misc_feature (147)..(147): n is a, c, g, or t
  misc_feature (153)..(153): n is a, c, g, or t
  misc_feature (156)..(156): n is a, c, g, or t
  misc_feature (162)..(162): n is a, c, g, or t
  misc_feature (168)..(168): n is a, c, g, or t
  misc_feature (171)..(171): n is a, c, g, or t
  misc_feature (183)..(183): n is a, c, g, or t
  misc_feature (189)..(189): n is a, c, g, or t
  misc_feature (192)..(192): n is a, c, g, or t
  misc_feature (201)..(201): n is a, c, g, or t
  misc_feature (204)..(204): n is a, c, g, or t
  misc_feature (207)..(207): n is a, c, g, or t
  misc_feature (213)..(213): n is a, c, g, or t
  misc_feature (216)..(216): n is a, c, g, or t
  misc_feature (219)..(219): n is a, c, g, or t
  misc_feature (222)..(222): n is a, c, g, or t
  misc_feature (225)..(225): n is a, c, g, or t
carathmgnttymgnytnggnccngcnwsnathathgaracnaaywsnaayggntggttyccngayacngayggngcnytnathacnggnytnacnttyytngayccnaargaygcnacnmgngtncarggnttyttycarcayytncargtnmgnttyggngayggnccntggcargaygtnaarggnytngaygargtnggnwsngayacnggnmgnacnggngar

SEQ ID NO: 961 - DNA, 228 bp, Artificial Sequence
  PfC-CNA16
  misc_feature (9)..(9): n is a, c, g, or t
  misc_feature (15)..(15): n is a, c, g, or t
  misc_feature (18)..(18): n is a, c, g, or t
  misc_feature (21)..(21): n is a, c, g, or t
  misc_feature (24)..(24): n is a, c, g, or t
  misc_feature (27)..(27): n is a, c, g, or t
  misc_feature (42)..(42): n is a, c, g, or t
  misc_feature (48)..(48): n is a, c, g, or t
  misc_feature (54)..(54): n is a, c, g, or t
  misc_feature (63)..(63): n is a, c, g, or t
  misc_feature (69)..(69): n is a, c, g, or t
  misc_feature (75)..(75): n is a, c, g, or t
  misc_feature (78)..(78): n is a, c, g, or t
  misc_feature (81)..(81): n is a, c, g, or t
  misc_feature (87)..(87): n is a, c, g, or t
  misc_feature (90)..(90): n is a, c, g, or t
  misc_feature (93)..(93): n is a, c, g, or t
  misc_feature (96)..(96): n is a, c, g, or t
  misc_feature (102)..(102): n is a, c, g, or t
  misc_feature (108)..(108): n is a, c, g, or t
  misc_feature (117)..(117): n is a, c, g, or t
  misc_feature (120)..(120): n is a, c, g, or t
  misc_feature (123)..(123): n is a, c, g, or t
  misc_feature (126)..(126): n is a, c, g, or t
  misc_feature (132)..(132): n is a, c, g, or t
  misc_feature (135)..(135): n is a, c, g, or t
  misc_feature (147)..(147): n is a, c, g, or t
  misc_feature (153)..(153): n is a, c, g, or t
  misc_feature (156)..(156): n is a, c, g, or t
  misc_feature (162)..(162): n is a, c, g, or t
  misc_feature (168)..(168): n is a, c, g, or t
  misc_feature (171)..(171): n is a, c, g, or t
  misc_feature (183)..(183): n is a, c, g, or t
  misc_feature (189)..(189): n is a, c, g, or t
  misc_feature (192)..(192): n is a, c, g, or t
  misc_feature (201)..(201): n is a, c, g, or t
  misc_feature (204)..(204): n is a, c, g, or t
  misc_feature (207)..(207): n is a, c, g, or t
  misc_feature (213)..(213): n is a, c, g, or t
  misc_feature (216)..(216): n is a, c, g, or t
  misc_feature (219)..(219): n is a, c, g, or t
  misc_feature (222)..(222): n is a, c, g, or t
  misc_feature (225)..(225): n is a, c, g, or t
carathmgnttymgnytnggnccnggnaayathathgaracnaaywsnaayggntggttyccngayacngayggngcnytnathacnggnytnacnttyytngayccnaargaygcnacnmgngtncarggnytnttycarcayytncargtnmgnttyggngayggnccntggcargaygtnaarggnytngaygargtnggnwsngayacnggnmgnacnggngar

SEQ ID NO: 962 - DNA, 228 bp, Artificial Sequence
  PfC-CNA17
  misc_feature (9)..(9): n is a, c, g, or t
  misc_feature (15)..(15): n is a, c, g, or t
  misc_feature (18)..(18): n is a, c, g, or t
  misc_feature (21)..(21): n is a, c, g, or t
  misc_feature (24)..(24): n is a, c, g, or t
  misc_feature (27)..(27): n is a, c, g, or t
  misc_feature (30)..(30): n is a, c, g, or t
  misc_feature (42)..(42): n is a, c, g, or t
  misc_feature (48)..(48): n is a, c, g, or t
  misc_feature (54)..(54): n is a, c, g, or t
  misc_feature (63)..(63): n is a, c, g, or t
  misc_feature (69)..(69): n is a, c, g, or t
  misc_feature (75)..(75): n is a, c, g, or t
  misc_feature (78)..(78): n is a, c, g, or t
  misc_feature (81)..(81): n is a, c, g, or t
  misc_feature (87)..(87): n is a, c, g, or t
  misc_feature (90)..(90): n is a, c, g, or t
  misc_feature (93)..(93): n is a, c, g, or t
  misc_feature (96)..(96): n is a, c, g, or t
  misc_feature (102)..(102): n is a, c, g, or t
  misc_feature (108)..(108): n is a, c, g, or t
  misc_feature (117)..(117): n is a, c, g, or t
  misc_feature (120)..(120): n is a, c, g, or t
  misc_feature (126)..(126): n is a, c, g, or t
  misc_feature (132)..(132): n is a, c, g, or t
  misc_feature (135)..(135): n is a, c, g, or t
  misc_feature (141)..(141): n is a, c, g, or t
  misc_feature (147)..(147): n is a, c, g, or t
  misc_feature (153)..(153): n is a, c, g, or t
  misc_feature (156)..(156): n is a, c, g, or t
  misc_feature (162)..(162): n is a, c, g, or t
  misc_feature (168)..(168): n is a, c, g, or t
  misc_feature (171)..(171): n is a, c, g, or t
  misc_feature (183)..(183): n is a, c, g, or t
  misc_feature (189)..(189): n is a, c, g, or t
  misc_feature (192)..(192): n is a, c, g, or t
  misc_feature (201)..(201): n is a, c, g, or t
  misc_feature (204)..(204): n is a, c, g, or t
  misc_feature (207)..(207): n is a, c, g, or t
  misc_feature (213)..(213): n is a, c, g, or t
  misc_feature (216)..(216): n is a, c, g, or t
  misc_feature (219)..(219): n is a, c, g, or t
  misc_feature (222)..(222): n is a, c, g, or t
  misc_feature (225)..(225): n is a, c, g, or t
carathmgnttymgnytnggnccngcnwsnathathgaracnaaywsnaayggntggttyccngayacngayggngcnytnathacnggnytnacnttyytngayccnaargaygcnacncargtncarggnytnttymgncayytncargtnmgnttyggngayggnccntggcargaygtnaarggnytngaygargtnggnwsngayacnggnmgnacnggngar

SEQ ID NO: 963 - DNA, 228 bp, Artificial Sequence
  PfC-CNA18
  misc_feature (9)..(9): n is a, c, g, or t
  misc_feature (15)..(15): n is a, c, g, or t
  misc_feature (18)..(18): n is a, c, g, or t
  misc_feature (21)..(21): n is a, c, g, or t
  misc_feature (24)..(24): n is a, c, g, or t
  misc_feature (27)..(27): n is a, c, g, or t
  misc_feature (30)..(30): n is a, c, g, or t
  misc_feature (42)..(42): n is a, c, g, or t
  misc_feature (48)..(48): n is a, c, g, or t
  misc_feature (54)..(54): n is a, c, g, or t
  misc_feature (63)..(63): n is a, c, g, or t
  misc_feature (69)..(69): n is a, c, g, or t
  misc_feature (75)..(75): n is a, c, g, or t
  misc_feature (78)..(78): n is a, c, g, or t
  misc_feature (81)..(81): n is a, c, g, or t
  misc_feature (87)..(87): n is a, c, g, or t
  misc_feature (90)..(90): n is a, c, g, or t
  misc_feature (93)..(93): n is a, c, g, or t
  misc_feature (96)..(96): n is a, c, g, or t
  misc_feature (102)..(102): n is a, c, g, or t
  misc_feature (108)..(108): n is a, c, g, or t
  misc_feature (117)..(117): n is a, c, g, or t
  misc_feature (120)..(120): n is a, c, g, or t
  misc_feature (126)..(126): n is a, c, g, or t
  misc_feature (132)..(132): n is a, c, g, or t
  misc_feature (135)..(135): n is a, c, g, or t
  misc_feature (141)..(141): n is a, c, g, or t
  misc_feature (147)..(147): n is a, c, g, or t
  misc_feature (153)..(153): n is a, c, g, or t
  misc_feature (156)..(156): n is a, c, g, or t
  misc_feature (162)..(162): n is a, c, g, or t
  misc_feature (168)..(168): n is a, c, g, or t
  misc_feature (171)..(171): n is a, c, g, or t
  misc_feature (183)..(183): n is a, c, g, or t
  misc_feature (189)..(189): n is a, c, g, or t
  misc_feature (192)..(192): n is a, c, g, or t
  misc_feature (201)..(201): n is a, c, g, or t
  misc_feature (204)..(204): n is a, c, g, or t
  misc_feature (207)..(207): n is a, c, g, or t
  misc_feature (213)..(213): n is a, c, g, or t
  misc_feature (216)..(216): n is a, c, g, or t
  misc_feature (219)..(219): n is a, c, g, or t
  misc_feature (222)..(222): n is a, c, g, or t
  misc_feature (225)..(225): n is a, c, g, or t
carathmgnttymgnytnggnccngcnwsnathathgaracnaaywsncayggntggttyccngayacngayggngcnytnathacnggnytnacnttyytngayccnaargaygcnacncargtncarggnytnttymgncayytncargtnmgnttyggngayggnccntggcargaygtnaarggnytngaygargtnggnwsngayacnggnmgnacnggngar

SEQ ID NO: 964 - DNA, 228 bp, Artificial Sequence
  PfC-CNA19
  misc_feature (9)..(9): n is a, c, g, or t
  misc_feature (15)..(15): n is a, c, g, or t
  misc_feature (18)..(18): n is a, c, g, or t
  misc_feature (21)..(21): n is a, c, g, or t
  misc_feature (24)..(24): n is a, c, g, or t
  misc_feature (27)..(27): n is a, c, g, or t
  misc_feature (30)..(30): n is a, c, g, or t
  misc_feature (42)..(42): n is a, c, g, or t
  misc_feature (48)..(48): n is a, c, g, or t
  misc_feature (54)..(54): n is a, c, g, or t
  misc_feature (63)..(63): n is a, c, g, or t
  misc_feature (69)..(69): n is a, c, g, or t
  misc_feature (75)..(75): n is a, c, g, or t
  misc_feature (78)..(78): n is a, c, g, or t
  misc_feature (81)..(81): n is a, c, g, or t
  misc_feature (87)..(87): n is a, c, g, or t
  misc_feature (90)..(90): n is a, c, g, or t
  misc_feature (93)..(93): n is a, c, g, or t
  misc_feature (96)..(96): n is a, c, g, or t
  misc_feature (102)..(102): n is a, c, g, or t
  misc_feature (108)..(108): n is a, c, g, or t
  misc_feature (117)..(117): n is a, c, g, or t
  misc_feature (120)..(120): n is a, c, g, or t
  misc_feature (126)..(126): n is a, c, g, or t
  misc_feature (132)..(132): n is a, c, g, or t
  misc_feature (135)..(135): n is a, c, g, or t
  misc_feature (147)..(147): n is a, c, g, or t
  misc_feature (153)..(153): n is a, c, g, or t
  misc_feature (156)..(156): n is a, c, g, or t
  misc_feature (162)..(162): n is a, c, g, or t
  misc_feature (168)..(168): n is a, c, g, or t
  misc_feature (171)..(171): n is a, c, g, or t
  misc_feature (183)..(183): n is a, c, g, or t
  misc_feature (189)..(189): n is a, c, g, or t
  misc_feature (192)..(192): n is a, c, g, or t
  misc_feature (201)..(201): n is a, c, g, or t
  misc_feature (204)..(204): n is a, c, g, or t
  misc_feature (207)..(207): n is a, c, g, or t
  misc_feature (213)..(213): n is a, c, g, or t
  misc_feature (216)..(216): n is a, c, g, or t
  misc_feature (219)..(219): n is a, c, g, or t
  misc_feature (222)..(222): n is a, c, g, or t
  misc_feature (225)..(225): n is a, c, g, or t
carathmgnttymgnytnggnccngcnwsnathathgaracnaaywsnaayggntggttyccngayacngayggngcnytnathacnggnytnacnttyytngayccnaargaygcnacncargtncarggnytnttycarcayytncargtnmgnttyggngayggnccntggcargaygtnaarggnytngaygargtnggnwsngayacnggnmgnacnggngar

SEQ ID NO: 965 - DNA, 228 bp, Artificial Sequence
  PfC-CNA20
  misc_feature (9)..(9): n is a, c, g, or t
  misc_feature (15)..(15): n is a, c, g, or t
  misc_feature (18)..(18): n is a, c, g, or t
  misc_feature (21)..(21): n is a, c, g, or t
  misc_feature (24)..(24): n is a, c, g, or t
  misc_feature (27)..(27): n is a, c, g, or t
  misc_feature (30)..(30): n is a, c, g, or t
  misc_feature (42)..(42): n is a, c, g, or t
  misc_feature (48)..(48): n is a, c, g, or t
  misc_feature (54)..(54): n is a, c, g, or t
  misc_feature (63)..(63): n is a, c, g, or t
  misc_feature (69)..(69): n is a, c, g, or t
  misc_feature (75)..(75): n is a, c, g, or t
  misc_feature (78)..(78): n is a, c, g, or t
  misc_feature (81)..(81): n is a, c, g, or t
  misc_feature (87)..(87): n is a, c, g, or t
  misc_feature (90)..(90): n is a, c, g, or t
  misc_feature (93)..(93): n is a, c, g, or t
  misc_feature (96)..(96): n is a, c, g, or t
  misc_feature (102)..(102): n is a, c, g, or t
  misc_feature (108)..(108): n is a, c, g, or t
  misc_feature (117)..(117): n is a, c, g, or t
  misc_feature (120)..(120): n is a, c, g, or t
  misc_feature (126)..(126): n is a, c, g, or t
  misc_feature (132)..(132): n is a, c, g, or t
  misc_feature (135)..(135): n is a, c, g, or t
  misc_feature (147)..(147): n is a, c, g, or t
  misc_feature (153)..(153): n is a, c, g, or t
  misc_feature (156)..(156): n is a, c, g, or t
  misc_feature (162)..(162): n is a, c, g, or t
  misc_feature (168)..(168): n is a, c, g, or t
  misc_feature (171)..(171): n is a, c, g, or t
  misc_feature (183)..(183): n is a, c, g, or t
  misc_feature (189)..(189): n is a, c, g, or t
  misc_feature (192)..(192): n is a, c, g, or t
  misc_feature (201)..(201): n is a, c, g, or t
  misc_feature (204)..(204): n is a, c, g, or t
  misc_feature (207)..(207): n is a, c, g, or t
  misc_feature (213)..(213): n is a, c, g, or t
  misc_feature (216)..(216): n is a, c, g, or t
  misc_feature (219)..(219): n is a, c, g, or t
  misc_feature (222)..(222): n is a, c, g, or t
  misc_feature (225)..(225): n is a, c, g, or t
carathmgnttymgnytnggnccngcnwsnathathgaracnaaywsnaayggntggttyccngayacngayggngcnytnathacnggnytnacnttyytngayccnaargaygcnacncargtncarggnytnttycarcayytncargtnmgnttyggngayggnccntggcargaygtnaarggnytngaygargtnggnwsngayacnggnwsnwsnggngar

SEQ ID NO: 966 - DNA, 228 bp, Artificial Sequence
  PfC-CNA21
  misc_feature (9)..(9): n is a, c, g, or t
  misc_feature (15)..(15): n is a, c, g, or t
  misc_feature (18)..(18): n is a, c, g, or t
  misc_feature (21)..(21): n is a, c, g, or t
  misc_feature (24)..(24): n is a, c, g, or t
  misc_feature (27)..(27): n is a, c, g, or t
  misc_feature (30)..(30): n is a, c, g, or t
  misc_feature (42)..(42): n is a, c, g, or t
  misc_feature (48)..(48): n is a, c, g, or t
  misc_feature (54)..(54): n is a, c, g, or t
  misc_feature (63)..(63): n is a, c, g, or t
  misc_feature (69)..(69): n is a, c, g, or t
  misc_feature (75)..(75): n is a, c, g, or t
  misc_feature (78)..(78): n is a, c, g, or t
  misc_feature (81)..(81): n is a, c, g, or t
  misc_feature (87)..(87): n is a, c, g, or t
  misc_feature (90)..(90): n is a, c, g, or t
  misc_feature (93)..(93): n is a, c, g, or t
  misc_feature (96)..(96): n is a, c, g, or t
  misc_feature (102)..(102): n is a, c, g, or t
  misc_feature (108)..(108): n is a, c, g, or t
  misc_feature (117)..(117): n is a, c, g, or t
  misc_feature (120)..(120): n is a, c, g, or t
  misc_feature (126)..(126): n is a, c, g, or t
  misc_feature (132)..(132): n is a, c, g, or t
  misc_feature (135)..(135): n is a, c, g, or t
  misc_feature (147)..(147): n is a, c, g, or t
  misc_feature (153)..(153): n is a, c, g, or t
  misc_feature (156)..(156): n is a, c, g, or t
  misc_feature (162)..(162): n is a, c, g, or t
  misc_feature (168)..(168): n is a, c, g, or t
  misc_feature (171)..(171): n is a, c, g, or t
  misc_feature (183)..(183): n is a, c, g, or t
  misc_feature (189)..(189): n is a, c, g, or t
  misc_feature (192)..(192): n is a, c, g, or t
  misc_feature (201)..(201): n is a, c, g, or t
  misc_feature (204)..(204): n is a, c, g, or t
  misc_feature (207)..(207): n is a, c, g, or t
  misc_feature (213)..(213): n is a, c, g, or t
  misc_feature (216)..(216): n is a, c, g, or t
  misc_feature (219)..(219): n is a, c, g, or t
  misc_feature (222)..(222): n is a, c, g, or t
  misc_feature (225)..(225): n is a, c, g, or t
carathmgnttymgnytnggnccngcnwsnathathgaracnaaywsnaayggntggttyccngayacngayggngcnytnathacnggnytnacnttyytngayccnaargaygcnacncargtncarggnytnttycarcayytncargtnmgnttyggngayggnccntggcargaygtnaarggnytnaaygargtnggnwsngayacnggnmgnacnggngar

SEQ ID NO: 967 - DNA, 228 bp, Artificial Sequence
  PfC-CNA22
  misc_feature (9)..(9): n is a, c, g, or t
  misc_feature (15)..(15): n is a, c, g, or t
  misc_feature (18)..(18): n is a, c, g, or t
  misc_feature (21)..(21): n is a, c, g, or t
  misc_feature (24)..(24): n is a, c, g, or t
  misc_feature (30)..(30): n is a, c, g, or t
  misc_feature (42)..(42): n is a, c, g, or t
  misc_feature (48)..(48): n is a, c, g, or t
  misc_feature (54)..(54): n is a, c, g, or t
  misc_feature (63)..(63): n is a, c, g, or t
  misc_feature (66)..(66): n is a, c, g, or t
  misc_feature (69)..(69): n is a, c, g, or t
  misc_feature (75)..(75): n is a, c, g, or t
  misc_feature (78)..(78): n is a, c, g, or t
  misc_feature (81)..(81): n is a, c, g, or t
  misc_feature (87)..(87): n is a, c, g, or t
  misc_feature (90)..(90): n is a, c, g, or t
  misc_feature (93)..(93): n is a, c, g, or t
  misc_feature (96)..(96): n is a, c, g, or t
  misc_feature (102)..(102): n is a, c, g, or t
  misc_feature (108)..(108): n is a, c, g, or t
  misc_feature (117)..(117): n is a, c, g, or t
  misc_feature (120)..(120): n is a, c, g, or t
  misc_feature (126)..(126): n is a, c, g, or t
  misc_feature (132)..(132): n is a, c, g, or t
  misc_feature (147)..(147): n is a, c, g, or t
  misc_feature (153)..(153): n is a, c, g, or t
  misc_feature (156)..(156): n is a, c, g, or t
  misc_feature (162)..(162): n is a, c, g, or t
  misc_feature (168)..(168): n is a, c, g, or t
  misc_feature (171)..(171): n is a, c, g, or t
  misc_feature (183)..(183): n is a, c, g, or t
  misc_feature (189)..(189): n is a, c, g, or t
  misc_feature (192)..(192): n is a, c, g, or t
  misc_feature (201)..(201): n is a, c, g, or t
  misc_feature (204)..(204): n is a, c, g, or t
  misc_feature (207)..(207): n is a, c, g, or t
  misc_feature (213)..(213): n is a, c, g, or t
  misc_feature (216)..(216): n is a, c, g, or t
  misc_feature (219)..(219): n is a, c, g, or t
  misc_feature (222)..(222): n is a, c, g, or t
  misc_feature (225)..(225): n is a, c, g, or t
carathmgnttymgnytnggnccnatgmgnathathgaracnaaywsntayggntggttyccnggnacngayggngcnytnathacnggnytnacnttyytngayccnaargaygcnacncargtncarggnatgttycarcayytncargtnmgnttyggngayggnccntggcargaygtnaarggnytngaygargtnggnwsngayacnggnmgnacnggngar

SEQ ID NO: 968 - DNA, 228 bp, Artificial Sequence
  PfC-CNA23
  misc_feature (9)..(9): n is a, c, g, or t
  misc_feature (15)..(15): n is a, c, g, or t
  misc_feature (18)..(18): n is a, c, g, or t
  misc_feature (21)..(21): n is a, c, g, or t
  misc_feature (24)..(24): n is a, c, g, or t
  misc_feature (27)..(27): n is a, c, g, or t
  misc_feature (30)..(30): n is a, c, g, or t
  misc_feature (42)..(42): n is a, c, g, or t
  misc_feature (48)..(48): n is a, c, g, or t
  misc_feature (54)..(54): n is a, c, g, or t
  misc_feature (63)..(63): n is a, c, g, or t
  misc_feature (66)..(66): n is a, c, g, or t
  misc_feature (69)..(69): n is a, c, g, or t
  misc_feature (75)..(75): n is a, c, g, or t
  misc_feature (78)..(78): n is a, c, g, or t
  misc_feature (81)..(81): n is a, c, g, or t
  misc_feature (87)..(87): n is a, c, g, or t
  misc_feature (90)..(90): n is a, c, g, or t
  misc_feature (93)..(93): n is a, c, g, or t
  misc_feature (96)..(96): n is a, c, g, or t
  misc_feature (102)..(102): n is a, c, g, or t
  misc_feature (108)..(108): n is a, c, g, or t
  misc_feature (117)..(117): n is a, c, g, or t
  misc_feature (120)..(120): n is a, c, g, or t
  misc_feature (126)..(126): n is a, c, g, or t
  misc_feature (132)..(132): n is a, c, g, or t
  misc_feature (147)..(147): n is a, c, g, or t
  misc_feature (153)..(153): n is a, c, g, or t
  misc_feature (156)..(156): n is a, c, g, or t
  misc_feature (162)..(162): n is a, c, g, or t
  misc_feature (168)..(168): n is a, c, g, or t
  misc_feature (171)..(171): n is a, c, g, or t
  misc_feature (183)..(183): n is a, c, g, or t
  misc_feature (189)..(189): n is a, c, g, or t
  misc_feature (192)..(192): n is a, c, g, or t
  misc_feature (201)..(201): n is a, c, g, or t
  misc_feature (204)..(204): n is a, c, g, or t
  misc_feature (207)..(207): n is a, c, g, or t
  misc_feature (213)..(213): n is a, c, g, or t
  misc_feature (216)..(216): n is a, c, g, or t
  misc_feature (219)..(219): n is a, c, g, or t
  misc_feature (222)..(222): n is a, c, g, or t
  misc_feature (225)..(225): n is a, c, g, or t
carathmgnttymgnytnggnccngcnwsnathathgaracnaaywsntayggntggttyccnggnacngayggngcnytnathacnggnytnacnttyytngayccnaargaygcnacncargtncarggnatgttycarcayytncargtnmgnttyggngayggnccntggcargaygtnaarggnytngaygargtnggnwsngayacnggnmgnacnggngar

SEQ ID NO: 969 - DNA, 228 bp, Artificial Sequence
  PfC-CNA24
  misc_feature (9)..(9): n is a, c, g, or t
  misc_feature (15)..(15): n is a, c, g, or t
  misc_feature (18)..(18): n is a, c, g, or t
  misc_feature (21)..(21): n is a, c, g, or t
  misc_feature (24)..(24): n is a, c, g, or t
  misc_feature (27)..(27): n is a, c, g, or t
  misc_feature (30)..(30): n is a, c, g, or t
  misc_feature (42)..(42): n is a, c, g, or t
  misc_feature (48)..(48): n is a, c, g, or t
  misc_feature (54)..(54): n is a, c, g, or t
  misc_feature (63)..(63): n is a, c, g, or t
  misc_feature (66)..(66): n is a, c, g, or t
  misc_feature (69)..(69): n is a, c, g, or t
  misc_feature (75)..(75): n is a, c, g, or t
  misc_feature (78)..(78): n is a, c, g, or t
  misc_feature (81)..(81): n is a, c, g, or t
  misc_feature (87)..(87): n is a, c, g, or t
  misc_feature (90)..(90): n is a, c, g, or t
  misc_feature (93)..(93): n is a, c, g, or t
  misc_feature (96)..(96): n is a, c, g, or t
  misc_feature (102)..(102): n is a, c, g, or t
  misc_feature (108)..(108): n is a, c, g, or t
  misc_feature (117)..(117): n is a, c, g, or t
  misc_feature (120)..(120): n is a, c, g, or t
  misc_feature (126)..(126): n is a, c, g, or t
  misc_feature (132)..(132): n is a, c, g, or t
  misc_feature (147)..(147): n is a, c, g, or t
  misc_feature (153)..(153): n is a, c, g, or t
  misc_feature (156)..(156): n is a, c, g, or t
  misc_feature (162)..(162): n is a, c, g, or t
  misc_feature (168)..(168): n is a, c, g, or t
  misc_feature (171)..(171): n is a, c, g, or t
  misc_feature (183)..(183): n is a, c, g, or t
  misc_feature (189)..(189): n is a, c, g, or t
  misc_feature (192)..(192): n is a, c, g, or t
  misc_feature (201)..(201): n is a, c, g, or t
  misc_feature (204)..(204): n is a, c, g, or t
  misc_feature (207)..(207): n is a, c, g, or t
  misc_feature (213)..(213): n is a, c, g, or t
  misc_feature (216)..(216): n is a, c, g, or t
  misc_feature (219)..(219): n is a, c, g, or t
  misc_feature (222)..(222): n is a, c, g, or t
  misc_feature (225)..(225): n is a, c, g, or t
carathmgnttymgnytnggnccngcnwsnathathgaracnaaywsnaayggntggttyccnggnacngayggngcnytnathacnggnytnacnttyytngayccnaargaygcnacncargtncarggnatgttycarcayytncargtnmgnttyggngayggnccntggcargaygtnaarggnytngaygargtnggnwsngayacnggnmgnacnggngar

SEQ ID NO: 970 - DNA, 228 bp, Artificial Sequence
  PfC-CNA25
  misc_feature (9)..(9): n is a, c, g, or t
  misc_feature (15)..(15): n is a, c, g, or t
  misc_feature (18)..(18): n is a, c, g, or t
  misc_feature (21)..(21): n is a, c, g, or t
  misc_feature (24)..(24): n is a, c, g, or t
  misc_feature (27)..(27): n is a, c, g, or t
  misc_feature (30)..(30): n is a, c, g, or t
  misc_feature (42)..(42): n is a, c, g, or t
  misc_feature (48)..(48): n is a, c, g, or t
  misc_feature (54)..(54): n is a, c, g, or t
  misc_feature (63)..(63): n is a, c, g, or t
  misc_feature (66)..(66): n is a, c, g, or t
  misc_feature (69)..(69): n is a, c, g, or t
  misc_feature (75)..(75): n is a, c, g, or t
  misc_feature (78)..(78): n is a, c, g, or t
  misc_feature (81)..(81): n is a, c, g, or t
  misc_feature (87)..(87): n is a, c, g, or t
  misc_feature (90)..(90): n is a, c, g, or t
  misc_feature (93)..(93): n is a, c, g, or t
  misc_feature (96)..(96): n is a, c, g, or t
  misc_feature (102)..(102): n is a, c, g, or t
  misc_feature (108)..(108): n is a, c, g, or t
  misc_feature (117)..(117): n is a, c, g, or t
  misc_feature (120)..(120): n is a, c, g, or t
  misc_feature (126)..(126): n is a, c, g, or t
  misc_feature (132)..(132): n is a, c, g, or t
  misc_feature (135)..(135): n is a, c, g, or t
  misc_feature (147)..(147): n is a, c, g, or t
  misc_feature (153)..(153): n is a, c, g, or t
  misc_feature (156)..(156): n is a, c, g, or t
  misc_feature (162)..(162): n is a, c, g, or t
  misc_feature (168)..(168): n is a, c, g, or t
  misc_feature (171)..(171): n is a, c, g, or t
  misc_feature (183)..(183): n is a, c, g, or t
  misc_feature (189)..(189): n is a, c, g, or t
  misc_feature (192)..(192): n is a, c, g, or t
  misc_feature (201)..(201): n is a, c, g, or t
  misc_feature (204)..(204): n is a, c, g, or t
  misc_feature (207)..(207): n is a, c, g, or t
  misc_feature (213)..(213): n is a, c, g, or t
  misc_feature (216)..(216): n is a, c, g, or t
  misc_feature (219)..(219): n is a, c, g, or t
  misc_feature (222)..(222): n is a, c, g, or t
  misc_feature (225)..(225): n is a, c, g, or t
carathmgnttymgnytnggnccngcnwsnathathgaracnaaywsnaayggntggttyccnggnacngayggngcnytnathacnggnytnacnttyytngayccnaargaygcnacncargtncarggnytnttycarcayytncargtnmgnttyggngayggnccntggcargaygtnaarggnytngaygargtnggnwsngayacnggnmgnacnggngar

SEQ ID NO: 971 - DNA, 228 bp, Artificial Sequence
  PfC-CNA26
  misc_feature (9)..(9): n is a, c, g, or t
  misc_feature (15)..(15): n is a, c, g, or t
  misc_feature (18)..(18): n is a, c, g, or t
  misc_feature (21)..(21): n is a, c, g, or t
  misc_feature (24)..(24): n is a, c, g, or t
  misc_feature (27)..(27): n is a, c, g, or t
  misc_feature (30)..(30): n is a, c, g, or t
  misc_feature (42)..(42): n is a, c, g, or t
  misc_feature (48)..(48): n is a, c, g, or t
  misc_feature (54)..(54): n is a, c, g, or t
  misc_feature (63)..(63): n is a, c, g, or t
  misc_feature (66)..(66): n is a, c, g, or t
  misc_feature (69)..(69): n is a, c, g, or t
  misc_feature (75)..(75): n is a, c, g, or t
  misc_feature (78)..(78): n is a, c, g, or t
  misc_feature (81)..(81): n is a, c, g, or t
  misc_feature (87)..(87): n is a, c, g, or t
  misc_feature (90)..(90): n is a, c, g, or t
  misc_feature (93)..(93): n is a, c, g, or t
  misc_feature (96)..(96): n is a, c, g, or t
  misc_feature (102)..(102): n is a, c, g, or t
  misc_feature (108)..(108): n is a, c, g, or t
  misc_feature (117)..(117): n is a, c, g, or t
  misc_feature (120)..(120): n is a, c, g, or t
  misc_feature (126)..(126): n is a, c, g, or t
  misc_feature (132)..(132): n is a, c, g, or t
  misc_feature (147)..(147): n is a, c, g, or t
  misc_feature (153)..(153): n is a, c, g, or t
  misc_feature (156)..(156): n is a, c, g, or t
  misc_feature (162)..(162): n is a, c, g, or t
  misc_feature (168)..(168): n is a, c, g, or t
  misc_feature (171)..(171): n is a, c, g, or t
  misc_feature (183)..(183): n is a, c, g, or t
  misc_feature (189)..(189): n is a, c, g, or t
  misc_feature (192)..(192): n is a, c, g, or t
  misc_feature (201)..(201): n is a, c, g, or t
  misc_feature (204)..(204): n is a, c, g, or t
  misc_feature (207)..(207): n is a, c, g, or t
  misc_feature (213)..(213): n is a, c, g, or t
  misc_feature (216)..(216): n is a, c, g, or t
  misc_feature (219)..(219): n is a, c, g, or t
  misc_feature (222)..(222): n is a, c, g, or t
  misc_feature (225)..(225): n is a, c, g, or t
carathmgnttymgnytnggnccngcnwsnathathgaracnaaywsnaayggntggttyccnggnacngayggngcnytnathacnggnytnacnttyytngayccnaargaygcnacncargtncarggnttyttycarcayytncargtnmgnttyggngayggnccntggcargaygtnaarggnytngaygargtnggnwsngayacnggnmgnacnggngar

SEQ ID NO: 972 - DNA, 228 bp, Artificial Sequence
  PfC-CNA27
  misc_feature (9)..(9): n is a, c, g, or t
  misc_feature (15)..(15): n is a, c, g, or t
  misc_feature (18)..(18): n is a, c, g, or t
  misc_feature (21)..(21): n is a, c, g, or t
  misc_feature (24)..(24): n is a, c, g, or t
  misc_feature (27)..(27): n is a, c, g, or t
  misc_feature (42)..(42): n is a, c, g, or t
  misc_feature (48)..(48): n is a, c, g, or t
  misc_feature (54)..(54): n is a, c, g, or t
  misc_feature (63)..(63): n is a, c, g, or t
  misc_feature (69)..(69): n is a, c, g, or t
  misc_feature (75)..(75): n is a, c, g, or t
  misc_feature (78)..(78): n is a, c, g, or t
  misc_feature (81)..(81): n is a, c, g, or t
  misc_feature (87)..(87): n is a, c, g, or t
  misc_feature (90)..(90): n is a, c, g, or t
  misc_feature (93)..(93): n is a, c, g, or t
  misc_feature (96)..(96): n is a, c, g, or t
  misc_feature (102)..(102): n is a, c, g, or t
  misc_feature (108)..(108): n is a, c, g, or t
  misc_feature (117)..(117): n is a, c, g, or t
  misc_feature (120)..(120): n is a, c, g, or t
  misc_feature (126)..(126): n is a, c, g, or t
  misc_feature (132)..(132): n is a, c, g, or t
  misc_feature (135)..(135): n is a, c, g, or t
  misc_feature (141)..(141): n is a, c, g, or t
  misc_feature (147)..(147): n is a, c, g, or t
  misc_feature (153)..(153): n is a, c, g, or t
  misc_feature (156)..(156): n is a, c, g, or t
  misc_feature (162)..(162): n is a, c, g, or t
  misc_feature (168)..(168): n is a, c, g, or t
  misc_feature (171)..(171): n is a, c, g, or t
  misc_feature (183)..(183): n is a, c, g, or t
  misc_feature (189)..(189): n is a, c, g, or t
  misc_feature (192)..(192): n is a, c, g, or t
  misc_feature (201)..(201): n is a, c, g, or t
  misc_feature (204)..(204): n is a, c, g, or t
  misc_feature (207)..(207): n is a, c, g, or t
  misc_feature (213)..(213): n is a, c, g, or t
  misc_feature (216)..(216): n is a, c, g, or t
  misc_feature (219)..(219): n is a, c, g, or t
  misc_feature (222)..(222): n is a, c, g, or t
  misc_feature (225)..(225): n is a, c, g, or t
carathmgnttymgnytnggnccnggnaayathathgaracnaaywsnaayggntggttyccngayacngayggngcnytnathacnggnytnacnttyytngayccnaargaygcnacncargtncarggnytnttymgncayytncargtnmgnttyggngayggnccntggcargaygtnaarggnytnaaygargtnggnwsngayacnggnmgnacnggngar

SEQ ID NO: 973 - DNA, 228 bp, Artificial Sequence
  PfC-CNA28
  misc_feature (9)..(9): n is a, c, g, or t
  misc_feature (15)..(15): n is a, c, g, or t
  misc_feature (18)..(18): n is a, c, g, or t
  misc_feature (21)..(21): n is a, c, g, or t
  misc_feature (24)..(24): n is a, c, g, or t
  misc_feature (27)..(27): n is a, c, g, or t
  misc_feature (42)..(42): n is a, c, g, or t
  misc_feature (48)..(48): n is a, c, g, or t
  misc_feature (54)..(54): n is a, c, g, or t
  misc_feature (63)..(63): n is a, c, g, or t
  misc_feature (69)..(69): n is a, c, g, or t
  misc_feature (75)..(75): n is a, c, g, or t
  misc_feature (78)..(78): n is a, c, g, or t
  misc_feature (81)..(81): n is a, c, g, or t
  misc_feature (87)..(87): n is a, c, g, or t
  misc_feature (90)..(90): n is a, c, g, or t
  misc_feature (93)..(93): n is a, c, g, or t
  misc_feature (96)..(96): n is a, c, g, or t
  misc_feature (102)..(102): n is a, c, g, or t
  misc_feature (108)..(108): n is a, c, g, or t
  misc_feature (117)..(117): n is a, c, g, or t
  misc_feature (120)..(120): n is a, c, g, or t
  misc_feature (126)..(126): n is a, c, g, or t
  misc_feature (132)..(132): n is a, c, g, or t
  misc_feature (135)..(135): n is a, c, g, or t
  misc_feature (141)..(141): n is a, c, g, or t
  misc_feature (147)..(147): n is a, c, g, or t
  misc_feature (153)..(153): n is a, c, g, or t
  misc_feature (156)..(156): n is a, c, g, or t
  misc_feature (162)..(162): n is a, c, g, or t
  misc_feature (168)..(168): n is a, c, g, or t
  misc_feature (171)..(171): n is a, c, g, or t
  misc_feature (183)..(183): n is a, c, g, or t
  misc_feature (189)..(189): n is a, c, g, or t
  misc_feature (192)..(192): n is a, c, g, or t
  misc_feature (201)..(201): n is a, c, g, or t
  misc_feature (204)..(204): n is a, c, g, or t
  misc_feature (207)..(207): n is a, c, g, or t
  misc_feature (213)..(213): n is a, c, g, or t
  misc_feature (216)..(216): n is a, c, g, or t
  misc_feature (219)..(219): n is a, c, g, or t
  misc_feature (222)..(222): n is a, c, g, or t
  misc_feature (225)..(225): n is a, c, g, or t
carathmgnttymgnytnggnccnggnaayathathgaracnaaywsnaayggntggttyccngayacngayggngcnytnathacnggnytnacnttyytngayccnaargayacnacncargtncarggnytnttymgncayytncargtnmgnttyggngayggnccntggcargaygtnaarggnytnaaygargtnggnwsngayacnggnmgnacnggngar

SEQ ID NO: 974 - DNA, 228 bp, Artificial Sequence
  PfC-CNA29
  misc_feature (9)..(9): n is a, c, g, or t
  misc_feature (15)..(15): n is a, c, g, or t
  misc_feature (18)..(18): n is a, c, g, or t
  misc_feature (21)..(21): n is a, c, g, or t
  misc_feature (24)..(24): n is a, c, g, or t
  misc_feature (27)..(27): n is a, c, g, or t
  misc_feature (42)..(42): n is a, c, g, or t
  misc_feature (48)..(48): n is a, c, g, or t
  misc_feature (54)..(54): n is a, c, g, or t
  misc_feature (63)..(63): n is a, c, g, or t
  misc_feature (69)..(69): n is a, c, g, or t
  misc_feature (75)..(75): n is a, c, g, or t
  misc_feature (78)..(78): n is a, c, g, or t
  misc_feature (81)..(81): n is a, c, g, or t
  misc_feature (87)..(87): n is a, c, g, or t
  misc_feature (90)..(90): n is a, c, g, or t
  misc_feature (93)..(93): n is a, c, g, or t
  misc_feature (96)..(96): n is a, c, g, or t
  misc_feature (102)..(102): n is a, c, g, or t
  misc_feature (108)..(108): n is a, c, g, or t
  misc_feature (117)..(117): n is a, c, g, or t
  misc_feature (120)..(120): n is a, c, g, or t
  misc_feature (126)..(126): n is a, c, g, or t
  misc_feature (132)..(132): n is a, c, g, or t
  misc_feature (135)..(135): n is a, c, g, or t
  misc_feature (141)..(141): n is a, c, g, or t
  misc_feature (147)..(147): n is a, c, g, or t
  misc_feature (153)..(153): n is a, c, g, or t
  misc_feature (156)..(156): n is a, c, g, or t
  misc_feature (162)..(162): n is a, c, g, or t
  misc_feature (168)..(168): n is a, c, g, or t
  misc_feature (171)..(171): n is a, c, g, or t
  misc_feature (183)..(183): n is a, c, g, or t
  misc_feature (189)..(189): n is a, c, g, or t
  misc_feature (192)..(192): n is a, c, g, or t
  misc_feature (201)..(201): n is a, c, g, or t
  misc_feature (204)..(204): n is a, c, g, or t
  misc_feature (207)..(207): n is a, c, g, or t
  misc_feature (213)..(213): n is a, c, g, or t
  misc_feature (216)..(216): n is a, c, g, or t
  misc_feature (219)..(219): n is a, c, g, or t
  misc_feature (222)..(222): n is a, c, g, or t
  misc_feature (225)..(225): n is a, c, g, or t
carathmgnttymgnytnggnccnggnaayathathgaracnaaywsncayggntggttyccngayacngayggngcnytnathacnggnytnacnttyytngayccnaargaygcnacncargtncarggnytnttymgncayytncargtnmgnttyggngayggnccntggcargaygtnaarggnytnaaygargtnggnwsngayacnggnmgnacnggngar

SEQ ID NO: 975 - DNA, 228 bp, Artificial Sequence
  PfC-CNA30
  misc_feature (9)..(9): n is a, c, g, or t
  misc_feature (15)..(15): n is a, c, g, or t
  misc_feature (18)..(18): n is a, c, g, or t
  misc_feature (21)..(21): n is a, c, g, or t
  misc_feature (24)..(24): n is a, c, g, or t
  misc_feature (27)..(27): n is a, c, g, or t
  misc_feature (42)..(42): n is a, c, g, or t
  misc_feature (48)..(48): n is a, c, g, or t
  misc_feature (54)..(54): n is a, c, g, or t
  misc_feature (63)..(63): n is a, c, g, or t
  misc_feature (69)..(69): n is a, c, g, or t
  misc_feature (75)..(75): n is a, c, g, or t
  misc_feature (78)..(78): n is a, c, g, or t
  misc_feature (81)..(81): n is a, c, g, or t
  misc_feature (87)..(87): n is a, c, g, or t
  misc_feature (90)..(90): n is a, c, g, or t
  misc_feature (93)..(93): n is a, c, g, or t
  misc_feature (96)..(96): n is a, c, g, or t
  misc_feature (102)..(102): n is a, c, g, or t
  misc_feature (108)..(108): n is a, c, g, or t
  misc_feature (117)..(117): n is a, c, g, or t
  misc_feature (120)..(120): n is a, c, g, or t
  misc_feature (126)..(126): n is a, c, g, or t
  misc_feature (132)..(132): n is a, c, g, or t
  misc_feature (135)..(135): n is a, c, g, or t
  misc_feature (141)..(141): n is a, c, g, or t
  misc_feature (147)..(147): n is a, c, g, or t
  misc_feature (153)..(153): n is a, c, g, or t
  misc_feature (156)..(156): n is a, c, g, or t
  misc_feature (162)..(162): n is a, c, g, or t
  misc_feature (168)..(168): n is a, c, g, or t
  misc_feature (171)..(171): n is a, c, g, or t
  misc_feature (183)..(183): n is a, c, g, or t
  misc_feature (189)..(189): n is a, c, g, or t
  misc_feature (192)..(192): n is a, c, g, or t
  misc_feature (201)..(201): n is a, c, g, or t
  misc_feature (204)..(204): n is a, c, g, or t
  misc_feature (207)..(207): n is a, c, g, or t
  misc_feature (213)..(213): n is a, c, g, or t
  misc_feature (216)..(216): n is a, c, g, or t
  misc_feature (219)..(219): n is a, c, g, or t
  misc_feature (222)..(222): n is a, c, g, or t
  misc_feature (225)..(225): n is a, c, g, or t
carathmgnttymgnytnggnccnggnaayathathgaracnaaywsnaayggntggttyccngayacngayggngcnytnathacnggnytnacnttyytngayccnaargaygcnacncargtncarggnytnttymgncayytncargtnmgnttyggngayggnccntggcargaygtnaarggnytngaygargtnggnwsngayacnggnmgnacnggngar

SEQ ID NO: 976 - DNA, 201 bp, Artificial Sequence
  PfC-CNA31
  misc_feature (3)..(3): n is a, c, g, or t
  misc_feature (9)..(9): n is a, c, g, or t
  misc_feature (12)..(12): n is a, c, g, or t
  misc_feature (15)..(15): n is a, c, g, or t
  misc_feature (18)..(18): n is a, c, g, or t
  misc_feature (24)..(24): n is a, c, g, or t
  misc_feature (27)..(27): n is a, c, g, or t
  misc_feature (30)..(30): n is a, c, g, or t
  misc_feature (33)..(33): n is a, c, g, or t
  misc_feature (36)..(36): n is a, c, g, or t
  misc_feature (39)..(39): n is a, c, g, or t
  misc_feature (48)..(48): n is a, c, g, or t
  misc_feature (54)..(54): n is a, c, g, or t
  misc_feature (66)..(66): n is a, c, g, or t
  misc_feature (75)..(75): n is a, c, g, or t
  misc_feature (87)..(87): n is a, c, g, or t
  misc_feature (90)..(90): n is a, c, g, or t
  misc_feature (96)..(96): n is a, c, g, or t
  misc_feature (102)..(102): n is a, c, g, or t
  misc_feature (105)..(105): n is a, c, g, or t
  misc_feature (111)..(111): n is a, c, g, or t
  misc_feature (117)..(117): n is a, c, g, or t
  misc_feature (141)..(141): n is a, c, g, or t
  misc_feature (144)..(144): n is a, c, g, or t
  misc_feature (147)..(147): n is a, c, g, or t
  misc_feature (150)..(150): n is a, c, g, or t
  misc_feature (153)..(153): n is a, c, g, or t
  misc_feature (162)..(162): n is a, c, g, or t
  misc_feature (165)..(165): n is a, c, g, or t
  misc_feature (168)..(168): n is a, c, g, or t
  misc_feature (174)..(174): n is a, c, g, or t
  misc_feature (177)..(177): n is a, c, g, or t
  misc_feature (192)..(192): n is a, c, g, or t
  misc_feature (195)..(195): n is a, c, g, or t
gtncarwsnytnacngcncarytnmgnytnggnccngcngayathytngarwsngaygaraayggnathathccngarcargaymgngtnathacncargtngtnathytngaygcngayaaraarcarathcartgygtngtnmgnccnytncarathytnmgngcngayggnmgntgggaraayathggnggnatgaar

SEQ ID NO: 977 - DNA, 201 bp, Artificial Sequence
  PfC-CNA32
  misc_feature (3)..(3): n is a, c, g, or t
  misc_feature (9)..(9): n is a, c, g, or t
  misc_feature (12)..(12): n is a, c, g, or t
  misc_feature (15)..(15): n is a, c, g, or t
  misc_feature (18)..(18): n is a, c, g, or t
  misc_feature (24)..(24): n is a, c, g, or t
  misc_feature (27)..(27): n is a, c, g, or t
  misc_feature (30)..(30): n is a, c, g, or t
  misc_feature (33)..(33): n is a, c, g, or t
  misc_feature (36)..(36): n is a, c, g, or t
  misc_feature (39)..(39): n is a, c, g, or t
  misc_feature (48)..(48): n is a, c, g, or t
  misc_feature (54)..(54): n is a, c, g, or t
  misc_feature (66)..(66): n is a, c, g, or t
  misc_feature (75)..(75): n is a, c, g, or t
  misc_feature (84)..(84): n is a, c, g, or t
  misc_feature (87)..(87): n is a, c, g, or t
  misc_feature (90)..(90): n is a, c, g, or t
  misc_feature (96)..(96): n is a, c, g, or t
  misc_feature (102)..(102): n is a, c, g, or t
  misc_feature (105)..(105): n is a, c, g, or t
  misc_feature (111)..(111): n is a, c, g, or t
  misc_feature (117)..(117): n is a, c, g, or t
  misc_feature (141)..(141): n is a, c, g, or t
  misc_feature (144)..(144): n is a, c, g, or t
  misc_feature (147)..(147): n is a, c, g, or t
  misc_feature (150)..(150): n is a, c, g, or t
  misc_feature (153)..(153): n is a, c, g, or t
  misc_feature (162)..(162): n is a, c, g, or t
  misc_feature (165)..(165): n is a, c, g, or t
  misc_feature (168)..(168): n is a, c, g, or t
  misc_feature (174)..(174): n is a, c, g, or t
  misc_feature (177)..(177): n is a, c, g, or t
  misc_feature (192)..(192): n is a, c, g, or t
  misc_feature (195)..(195): n is a, c, g, or t
gtncarwsnytnacngcncarytnmgnytnggnccngcngayathytngarwsngaygaraayggnathathccngarcargcnmgngtnathacncargtngtnathytngaygcngayaaraarcarathcartgygtngtnmgnccnytncarathytnmgngcngayggnmgntgggaraayathggnggnatgaar

SEQ ID NO: 978 - DNA, 201 bp, Artificial Sequence
  PfC-CNA33
  misc_feature (3)..(3): n is a, c, g, or t
  misc_feature (9)..(9): n is a, c, g, or t
  misc_feature (12)..(12): n is a, c, g, or t
  misc_feature (15)..(15): n is a, c, g, or t
  misc_feature (18)..(18): n is a, c, g, or t
  misc_feature (24)..(24): n is a, c, g, or t
  misc_feature (27)..(27): n is a, c, g, or t
  misc_feature (30)..(30): n is a, c, g, or t
  misc_feature (33)..(33): n is a, c, g, or t
  misc_feature (36)..(36): n is a, c, g, or t
  misc_feature (39)..(39): n is a, c, g, or t
  misc_feature (48)..(48): n is a, c, g, or t
  misc_feature (54)..(54): n is a, c, g, or t
  misc_feature (66)..(66): n is a, c, g, or t
  misc_feature (75)..(75): n is a, c, g, or t
  misc_feature (84)..(84): n is a, c, g, or t
  misc_feature (87)..(87): n is a, c, g, or t
  misc_feature (90)..(90): n is a, c, g, or t
  misc_feature (96)..(96): n is a, c, g, or t
  misc_feature (102)..(102): n is a, c, g, or t
  misc_feature (105)..(105): n is a, c, g, or t
  misc_feature (111)..(111): n is a, c, g, or t
  misc_feature (117)..(117): n is a, c, g, or t
  misc_feature (141)..(141): n is a, c, g, or t
  misc_feature (144)..(144): n is a, c, g, or t
  misc_feature (147)..(147): n is a, c, g, or t
  misc_feature (150)..(150): n is a, c, g, or t
  misc_feature (153)..(153): n is a, c, g, or t
  misc_feature (162)..(162): n is a, c, g, or t
  misc_feature (165)..(165): n is a, c, g, or t
  misc_feature (168)..(168): n is a, c, g, or t
  misc_feature (174)..(174): n is a, c, g, or t
  misc_feature (177)..(177): n is a, c, g, or t
  misc_feature (192)..(192): n is a, c, g, or t
  misc_feature (195)..(195): n is a, c, g, or t
gtncarwsnccnacngcncarytnmgnytnggnccngcngayathytngarwsngaygaraayggnathathccngarcargcnmgngtnathacncargtngtnathytngaygcngayaaraarcarathcartgygtngtnmgnccnytncarathytnmgngcngayggnacntgggaraayathggnggnatgaar

SEQ ID NO: 979 - DNA, 201 bp, Artificial Sequence
  PfC-CNA34
  misc_feature (3)..(3): n is a, c, g, or t
  misc_feature (9)..(9): n is a, c, g, or t
  misc_feature (12)..(12): n is a, c, g, or t
  misc_feature (15)..(15): n is a, c, g, or t
  misc_feature (18)..(18): n is a, c, g, or t
  misc_feature (24)..(24): n is a, c, g, or t
  misc_feature (27)..(27): n is a, c, g, or t
  misc_feature (30)..(30): n is a, c, g, or t
  misc_feature (33)..(33): n is a, c, g, or t
  misc_feature (36)..(36): n is a, c, g, or t
  misc_feature (39)..(39): n is a, c, g, or t
  misc_feature (48)..(48): n is a, c, g, or t
  misc_feature (54)..(54): n is a, c, g, or t
  misc_feature (66)..(66): n is a, c, g, or t
  misc_feature (75)..(75): n is a, c, g, or t
  misc_feature (84)..(84): n is a, c, g, or t
  misc_feature (87)..(87): n is a, c, g, or t
  misc_feature (90)..(90): n is a, c, g, or t
  misc_feature (96)..(96): n is a, c, g, or t
  misc_feature (102)..(102): n is a, c, g, or t
  misc_feature (105)..(105): n is a, c, g, or t
  misc_feature (111)..(111): n is a, c, g, or t
  misc_feature (117)..(117): n is a, c, g, or t
  misc_feature (141)..(141): n is a, c, g, or t
  misc_feature (144)..(144): n is a, c, g, or t
  misc_feature (147)..(147): n is a, c, g, or t
  misc_feature (150)..(150): n is a, c, g, or t
  misc_feature (153)..(153): n is a, c, g, or t
  misc_feature (162)..(162): n is a, c, g, or t
  misc_feature (165)..(165): n is a, c, g, or t
  misc_feature (168)..(168): n is a, c, g, or t
  misc_feature (174)..(174): n is a, c, g, or t
  misc_feature (177)..(177): n is a, c, g, or t
  misc_feature (192)..(192): n is a, c, g, or t
  misc_feature (195)..(195): n is a, c, g, or t
gtncarwsnccnacngcncarytnmgnytnggnccngcngayathytngarwsngaygaraaywsnathathccngarcargcnmgngtnathacncargtngtnathytngaygcngayaaraarcarathcartgygtngtnmgnccnytncarathytnmgngcngayggnacntgggaraayathggnggnatgaar

SEQ ID NO: 980 - DNA, 201 bp, Artificial Sequence
  PfC-CNA35
  misc_feature (3)..(3): n is a, c, g, or t
  misc_feature (9)..(9): n is a, c, g, or t
  misc_feature (12)..(12): n is a, c, g, or t
  misc_feature (15)..(15): n is a, c, g, or t
  misc_feature (18)..(18): n is a, c, g, or t
  misc_feature (24)..(24): n is a, c, g, or t
  misc_feature (27)..(27): n is a, c, g, or t
  misc_feature (30)..(30): n is a, c, g, or t
  misc_feature (33)..(33): n is a, c, g, or t
  misc_feature (36)..(36): n is a, c, g, or t
  misc_feature (39)..(39): n is a, c, g, or t
  misc_feature (48)..(48): n is a, c, g, or t
  misc_feature (54)..(54): n is a, c, g, or t
  misc_feature (66)..(66): n is a, c, g, or t
  misc_feature (75)..(75): n is a, c, g, or t
  misc_feature (84)..(84): n is a, c, g, or t
  misc_feature (87)..(87): n is a, c, g, or t
  misc_feature (90)..(90): n is a, c, g, or t
  misc_feature (96)..(96): n is a, c, g, or t
  misc_feature (102)..(102): n is a, c, g, or t
  misc_feature (105)..(105): n is a, c, g, or t
  misc_feature (111)..(111): n is a, c, g, or t
  misc_feature (117)..(117): n is a, c, g, or t
  misc_feature (141)..(141): n is a, c, g, or t
  misc_feature (144)..(144): n is a, c, g, or t
  misc_feature (147)..(147): n is a, c, g, or t
  misc_feature (150)..(150): n is a, c, g, or t
  misc_feature (153)..(153): n is a, c, g, or t
  misc_feature (162)..(162): n is a, c, g, or t
  misc_feature (165)..(165): n is a, c, g, or t
  misc_feature (168)..(168): n is a, c, g, or t
  misc_feature (174)..(174): n is a, c, g, or t
  misc_feature (177)..(177): n is a, c, g, or t
  misc_feature (192)..(192): n is a, c, g, or t
gtncarwsnccnacngcncarytnmgnytnggnccngcngayathytngarwsngaygaraayggnathathccngarcargcnmgngtnathacncargtngtnathytngaygcngayaaraarcarathcartgygtngtnmgnccnytncarathytnmgngcngayggnacntgggaraayathggntggatgaar

SEQ ID NO: 981 - DNA, 201 bp, Artificial Sequence
  PfC-CNA36
  misc_feature (3)..(3): n is a, c, g, or t
  misc_feature (9)..(9): n is a, c, g, or t
  misc_feature (12)..(12): n is a, c, g, or t
  misc_feature (15)..(15): n is a, c, g, or t
  misc_feature (18)..(18): n is a, c, g, or t
  misc_feature (24)..(24): n is a, c, g, or t
  misc_feature (27)..(27): n is a, c, g, or t
  misc_feature (30)..(30): n is a, c, g, or t
  misc_feature (33)..(33): n is a, c, g, or t
  misc_feature (36)..(36): n is a, c, g, or t
  misc_feature (39)..(39): n is a, c, g, or t
  misc_feature (48)..(48): n is a, c, g, or t
  misc_feature (54)..(54): n is a, c, g, or t
  misc_feature (66)..(66): n is a, c, g, or t
  misc_feature (75)..(75): n is a, c, g, or t
  misc_feature (87)..(87): n is a, c, g, or t
  misc_feature (90)..(90): n is a, c, g, or t
  misc_feature (96)..(96): n is a, c, g, or t
  misc_feature (102)..(102): n is a, c, g, or t
  misc_feature (105)..(105): n is a, c, g, or t
  misc_feature (111)..(111): n is a, c, g, or t
  misc_feature (117)..(117): n is a, c, g, or t
  misc_feature (141)..(141): n is a, c, g, or t
  misc_feature (144)..(144): n is a, c, g, or t
  misc_feature (147)..(147): n is a, c, g, or t
  misc_feature (150)..(150): n is a, c, g, or t
  misc_feature (153)..(153): n is a, c, g, or t
  misc_feature (162)..(162): n is a, c, g, or t
  misc_feature (165)..(165): n is a, c, g, or t
  misc_feature (168)..(168): n is a, c, g, or t
  misc_feature (174)..(174): n is a, c, g, or t
  misc_feature (177)..(177): n is a, c, g, or t
  misc_feature (192)..(192): n is a, c, g, or t
  misc_feature (195)..(195): n is a, c, g, or t
gtncarwsnccnacngcncarytnmgnytnggnccngcngayathytngarwsngaygaraayggnathathccngarcargaymgngtnathacncargtngtnathytngaygcngayaaraarcarathcartgygtngtnmgnccnytncarathytnmgngcngayggnacntgggaraayathggnggnatgaar

SEQ ID NO: 982 - DNA, 201 bp, Artificial Sequence
  PfC-CNA37
  misc_feature (3)..(3): n is a, c, g, or t
  misc_feature (9)..(9): n is a, c, g, or t
  misc_feature (12)..(12): n is a, c, g, or t
  misc_feature (15)..(15): n is a, c, g, or t
  misc_feature (18)..(18): n is a, c, g, or t
  misc_feature (24)..(24): n is a, c, g, or t
  misc_feature (27)..(27): n is a, c, g, or t
  misc_feature (30)..(30): n is a, c, g, or t
  misc_feature (33)..(33): n is a, c, g, or t
  misc_feature (36)..(36): n is a, c, g, or t
  misc_feature (39)..(39): n is a, c, g, or t
  misc_feature (48)..(48): n is a, c, g, or t
  misc_feature (54)..(54): n is a, c, g, or t
  misc_feature (66)..(66): n is a, c, g, or t
  misc_feature (75)..(75): n is a, c, g, or t
  misc_feature (87)..(87): n is a, c, g, or t
  misc_feature (90)..(90): n is a, c, g, or t
  misc_feature (96)..(96): n is a, c, g, or t
  misc_feature (102)..(102): n is a, c, g, or t
  misc_feature (105)..(105): n is a, c, g, or t
  misc_feature (111)..(111): n is a, c, g, or t
  misc_feature (117)..(117): n is a, c, g, or t
  misc_feature (141)..(141): n is a, c, g, or t
  misc_feature (144)..(144): n is a, c, g, or t
  misc_feature (147)..(147): n is a, c, g, or t
  misc_feature (150)..(150): n is a, c, g, or t
  misc_feature (153)..(153): n is a, c, g, or t
  misc_feature (162)..(162): n is a, c, g, or t
  misc_feature (165)..(165): n is a, c, g, or t
  misc_feature (168)..(168): n is a, c, g, or t
  misc_feature (174)..(174): n is a, c, g, or t
  misc_feature (177)..(177): n is a, c, g, or t
  misc_feature (192)..(192): n is a, c, g, or t
  misc_feature (195)..(195): n is a, c, g, or t
gtncarwsnytnacngcncarytnmgnytnggnccngcngayathytngarwsngaygaraayggnathathccngarcargaymgngtnathacncargtngtnathytngaygcngayaaraarcarathcartgygtngtnmgnccnytncarathytnmgngcngayggnacntgggaraayathggnggnatgaar

SEQ ID NO: 983 - DNA, 201 bp, Artificial Sequence
  PfC-CNA38
  misc_feature (3)..(3): n is a, c, g, or t
  misc_feature (9)..(9): n is a, c, g, or t
  misc_feature (12)..(12): n is a, c, g, or t
  misc_feature (15)..(15): n is a, c, g, or t
  misc_feature (18)..(18): n is a, c, g, or t
  misc_feature (24)..(24): n is a, c, g, or t
  misc_feature (27)..(27): n is a, c, g, or t
  misc_feature (30)..(30): n is a, c, g, or t
  misc_feature (33)..(33): n is a, c, g, or t
  misc_feature (36)..(36): n is a, c, g, or t
  misc_feature (39)..(39): n is a, c, g, or t
  misc_feature (48)..(48): n is a, c, g, or t
  misc_feature (54)..(54): n is a, c, g, or t
  misc_feature (66)..(66): n is a, c, g, or t
  misc_feature (75)..(75): n is a, c, g, or t
  misc_feature (87)..(87): n is a, c, g, or t
  misc_feature (90)..(90): n is a, c, g, or t
  misc_feature (96)..(96): n is a, c, g, or t
  misc_feature (102)..(102): n is a, c, g, or t
  misc_feature (105)..(105): n is a, c, g, or t
  misc_feature (111)..(111): n is a, c, g, or t
  misc_feature (117)..(117): n is a, c, g, or t
  misc_feature (141)..(141): n is a, c, g, or t
  misc_feature (144)..(144): n is a, c, g, or t
  misc_feature (147)..(147): n is a, c, g, or t
  misc_feature (150)..(150): n is a, c, g, or t
  misc_feature (153)..(153): n is a, c, g, or t
  misc_feature (162)..(162): n is a, c, g, or t
  misc_feature (165)..(165): n is a, c, g, or t
  misc_feature (168)..(168): n is a, c, g, or t
  misc_feature (174)..(174): n is a, c, g, or t
  misc_feature (177)..(177): n is a, c, g, or t
  misc_feature (192)..(192): n is a, c, g, or t
  misc_feature (195)..(195): n is a, c, g, or t
gtncarwsnytnacngcncarytnmgnytnggnccngcngayathytngarwsngaygaraayggnathathccngarcargaymgngtnathacncargtngtnathytngaygcngayaaraarcarathcartgygtngtnmgnccnytncarathytnmgnggngayggnacntgggaraayathggnggnatgaar

SEQ ID NO: 984 - DNA, 201 bp, Artificial Sequence
  PfC-CNA39
  misc_feature (3)..(3): n is a, c, g, or t
  misc_feature (9)..(9): n is a, c, g, or t
  misc_feature (12)..(12): n is a, c, g, or t
  misc_feature (15)..(15): n is a, c, g, or t
  misc_feature (18)..(18): n is a, c, g, or t
  misc_feature (24)..(24): n is a, c, g, or t
  misc_feature (27)..(27): n is a, c, g, or t
  misc_feature (30)..(30): n is a, c, g, or t
  misc_feature (33)..(33): n is a, c, g, or t
  misc_feature (36)..(36): n is a, c, g, or t
  misc_feature (39)..(39): n is a, c, g, or t
  misc_feature (48)..(48): n is a, c, g, or t
  misc_feature (54)..(54): n is a, c, g, or t
  misc_feature (66)..(66): n is a, c, g, or t
  misc_feature (75)..(75): n is a, c, g, or t
  misc_feature (87)..(87): n is a, c, g, or t
  misc_feature (90)..(90): n is a, c, g, or t
  misc_feature (96)..(96): n is a, c, g, or t
  misc_feature (102)..(102): n is a, c, g, or t
  misc_feature (105)..(105): n is a, c, g, or t
  misc_feature (111)..(111): n is a, c, g, or t
  misc_feature (117)..(117): n is a, c, g, or t
  misc_feature (129)..(129): n is a, c, g, or t
  misc_feature (141)..(141): n is a, c, g, or t
  misc_feature (144)..(144): n is a, c, g, or t
  misc_feature (147)..(147): n is a, c, g, or t
  misc_feature (150)..(150): n is a, c, g, or t
  misc_feature (153)..(153): n is a, c, g, or t
  misc_feature (162)..(162): n is a, c, g, or t
  misc_feature (165)..(165): n is a, c, g, or t
  misc_feature (168)..(168): n is a, c, g, or t
  misc_feature (174)..(174): n is a, c, g, or t
  misc_feature (177)..(177): n is a, c, g, or t
  misc_feature (192)..(192): n is a, c, g, or t
  misc_feature (195)..(195): n is a, c, g, or t
gtncarwsnytnacngcncarytnmgnytnggnccngcngayathytngarwsngaygaraayggnathathccngarcargaymgngtnathacncargtngtnathytngayacngayaaraarytnathcartgygtngtnmgnccnytncarathytnmgngcngayggnacntgggaraayathggnggnatgaar

SEQ ID NO: 985 - DNA, 201 bp, Artificial Sequence
  PfC-CNA40
  misc_feature (3)..(3): n is a, c, g, or t
  misc_feature (9)..(9): n is a, c, g, or t
  misc_feature (12)..(12): n is a, c, g, or t
  misc_feature (15)..(15): n is a, c, g, or t
  misc_feature (18)..(18): n is a, c, g, or t
  misc_feature (24)..(24): n is a, c, g, or t
  misc_feature (27)..(27): n is a, c, g, or t
  misc_feature (30)..(30): n is a, c, g, or t
  misc_feature (33)..(33): n is a, c, g, or t
  misc_feature (36)..(36): n is a, c, g, or t
  misc_feature (39)..(39): n is a, c, g, or t
  misc_feature (48)..(48): n is a, c, g, or t
  misc_feature (54)..(54): n is a, c, g, or t
  misc_feature (66)..(66): n is a, c, g, or t
  misc_feature (75)..(75): n is a, c, g, or t
  misc_feature (87)..(87): n is a, c, g, or t
  misc_feature (90)..(90): n is a, c, g, or t
  misc_feature (96)..(96): n is a, c, g, or t
  misc_feature (102)..(102): n is a, c, g, or t
  misc_feature (105)..(105): n is a, c, g, or t
  misc_feature (111)..(111): n is a, c, g, or t
  misc_feature (117)..(117): n is a, c, g, or t
  misc_feature (141)..(141): n is a, c, g, or t
  misc_feature (144)..(144): n is a, c, g, or t
  misc_feature (147)..(147): n is a, c, g, or t
  misc_feature (150)..(150): n is a, c, g, or t
  misc_feature (153)..(153): n is a, c, g, or t
  misc_feature (162)..(162): n is a, c, g, or t
  misc_feature (165)..(165): n is a, c, g, or t
  misc_feature (168)..(168): n is a, c, g, or t
  misc_feature (174)..(174): n is a, c, g, or t
  misc_feature (177)..(177): n is a, c, g, or t
  misc_feature (189)..(189): n is a, c, g, or t
  misc_feature (192)..(192): n is a, c, g, or t
  misc_feature (195)..(195): n is a, c, g, or t
gtncarwsnytnacngcncarytnmgnytnggnccngcngayathytngarwsngaygaraayggnathathccngarcargaymgngtnathacncargtngtnathytngaygcngayaaraarcarathcartgygtngtnmgnccnytncarathytnmgngcngayggnacntgggaraaygtnggnggnatgaar

SEQ ID NO: 986 - DNA, 201 bp, Artificial Sequence
  PfC-CNA41
  misc_feature (3)..(3): n is a, c, g, or t
  misc_feature (9)..(9): n is a, c, g, or t
  misc_feature (12)..(12): n is a, c, g, or t
  misc_feature (15)..(15): n is a, c, g, or t
  misc_feature (18)..(18): n is a, c, g, or t
  misc_feature (24)..(24): n is a, c, g, or t
  misc_feature (27)..(27): n is a, c, g, or t
  misc_feature (30)..(30): n is a, c, g, or t
  misc_feature (33)..(33): n is a, c, g, or t
  misc_feature (36)..(36): n is a, c, g, or t
  misc_feature (39)..(39): n is a, c, g, or t
  misc_feature (48)..(48): n is a, c, g, or t
  misc_feature (54)..(54): n is a, c, g, or t
  misc_feature (66)..(66): n is a, c, g, or t
  misc_feature (75)..(75): n is a, c, g, or t
  misc_feature (87)..(87): n is a, c, g, or t
  misc_feature (90)..(90): n is a, c, g, or t
  misc_feature (96)..(96): n is a, c, g, or t
  misc_feature (102)..(102): n is a, c, g, or t
  misc_feature (105)..(105): n is a, c, g, or t
  misc_feature (111)..(111): n is a, c, g, or t
  misc_feature (117)..(117): n is a, c, g, or t
  misc_feature (141)..(141): n is a, c, g, or t
  misc_feature (144)..(144): n is a, c, g, or t
  misc_feature (147)..(147): n is a, c, g, or t
  misc_feature (150)..(150): n is a, c, g, or t
  misc_feature (153)..(153): n is a, c, g, or t
  misc_feature (162)..(162): n is a, c, g, or t
  misc_feature (165)..(165): n is a, c, g, or t
  misc_feature (168)..(168): n is a, c, g, or t
  misc_feature (174)..(174): n is a, c, g, or t
  misc_feature (177)..(177): n is a, c, g, or t
  misc_feature (192)..(192): n is a, c, g, or t
gtncarwsnytnacngcncarytnmgnytnggnccngcngayathytngarwsngaygaraayggnathathccngarcargaymgngtnathacncargtngtnathytngaygcngayaaraarcarathcartgygtngtnmgnccnytncarathytnmgngcngayggnacntgggaraayathggngaratgaar

SEQ ID NO: 987 - DNA, 201 bp, Artificial Sequence
  PfC-CNA42
  misc_feature (3)..(3): n is a, c, g, or t
  misc_feature (9)..(9): n is a, c, g, or t
  misc_feature (12)..(12): n is a, c, g, or t
  misc_feature (15)..(15): n is a, c, g, or t
  misc_feature (18)..(18): n is a, c, g, or t
  misc_feature (24)..(24): n is a, c, g, or t
  misc_feature (27)..(27): n is a, c, g, or t
  misc_feature (30)..(30): n is a, c, g, or t
  misc_feature (33)..(33): n is a, c, g, or t
  misc_feature (36)..(36): n is a, c, g, or t
  misc_feature (39)..(39): n is a, c, g, or t
  misc_feature (48)..(48): n is a, c, g, or t
  misc_feature (54)..(54): n is a, c, g, or t
  misc_feature (66)..(66): n is a, c, g, or t
  misc_feature (75)..(75): n is a, c, g, or t
  misc_feature (84)..(84): n is a, c, g, or t
  misc_feature (87)..(87): n is a, c, g, or t
  misc_feature (90)..(90): n is a, c, g, or t
  misc_feature (96)..(96): n is a, c, g, or t
  misc_feature (102)..(102): n is a, c, g, or t
  misc_feature (105)..(105): n is a, c, g, or t
  misc_feature (111)..(111): n is a, c, g, or t
  misc_feature (117)..(117): n is a, c, g, or t
  misc_feature (141)..(141): n is a, c, g, or t
  misc_feature (144)..(144): n is a, c, g, or t
  misc_feature (147)..(147): n is a, c, g, or t
  misc_feature (150)..(150): n is a, c, g, or t
  misc_feature (153)..(153): n is a, c, g, or t
  misc_feature (162)..(162): n is a, c, g, or t
  misc_feature (165)..(165): n is a, c, g, or t
  misc_feature (168)..(168): n is a, c, g, or t
  misc_feature (174)..(174): n is a, c, g, or t
  misc_feature (177)..(177): n is a, c, g, or t
  misc_feature (192)..(192): n is a, c, g, or t
  misc_feature (195)..(195): n is a, c, g, or t
ggncarwsnytnacngcncarytnmgnytnggnccngcngayathytngarwsngaygaraayggnathathccngarcargcnmgngtnathacncargtngtnathytngaygcngayaaraarcarathcartgygtngtnmgnccnytncarathytnmgngcngayggnacntgggaraayathggnggnatgaar

SEQ ID NO: 988 - DNA, 201 bp, Artificial Sequence
  PfC-CNA43
  misc_feature (3)..(3): n is a, c, g, or t
  misc_feature (9)..(9): n is a, c, g, or t
  misc_feature (12)..(12): n is a, c, g, or t
  misc_feature (15)..(15): n is a, c, g, or t
  misc_feature (18)..(18): n is a, c, g, or t
  misc_feature (24)..(24): n is a, c, g, or t
  misc_feature (27)..(27): n is a, c, g, or t
  misc_feature (30)..(30): n is a, c, g, or t
  misc_feature (33)..(33): n is a, c, g, or t
  misc_feature (36)..(36): n is a, c, g, or t
  misc_feature (39)..(39): n is a, c, g, or t
  misc_feature (48)..(48): n is a, c, g, or t
  misc_feature (54)..(54): n is a, c, g, or t
  misc_feature (66)..(66): n is a, c, g, or t
  misc_feature (75)..(75): n is a, c, g, or t
  misc_feature (87)..(87): n is a, c, g, or t
  misc_feature (90)..(90): n is a, c, g, or t
  misc_feature (96)..(96): n is a, c, g, or t
  misc_feature (102)..(102): n is a, c, g, or t
  misc_feature (105)..(105): n is a, c, g, or t
  misc_feature (111)..(111): n is a, c, g, or t
  misc_feature (117)..(117): n is a, c, g, or t
  misc_feature (141)..(141): n is a, c, g, or t
  misc_feature (144)..(144): n is a, c, g, or t
  misc_feature (147)..(147): n is a, c, g, or t
  misc_feature (150)..(150): n is a, c, g, or t
  misc_feature (153)..(153): n is a, c, g, or t
  misc_feature (162)..(162): n is a, c, g, or t
  misc_feature (165)..(165): n is a, c, g, or t
  misc_feature (168)..(168): n is a, c, g, or t
  misc_feature (174)..(174): n is a, c, g, or t
  misc_feature (177)..(177): n is a, c, g, or t
  misc_feature (192)..(192): n is a, c, g, or t
  misc_feature (195)..(195): n is a, c, g, or t
ggncarwsnytnacngcncarytnmgnytnggnccngcngayathytngarwsngaygaraayggnathathccngarcargaymgngtnathacncargtngtnathytngaygcngayaaraarcarathcartgygtngtnmgnccnytncarathytnmgngcngayggnacntgggaraayathggnggnatgaar

SEQ ID NO: 989 - DNA, 201 bp, Artificial Sequence
  PfC-CNA44
  misc_feature (3)..(3): n is a, c, g, or t
  misc_feature (9)..(9): n is a, c, g, or t
  misc_feature (12)..(12): n is a, c, g, or t
  misc_feature (15)..(15): n is a, c, g, or t
  misc_feature (18)..(18): n is a, c, g, or t
  misc_feature (24)..(24): n is a, c, g, or t
  misc_feature (27)..(27): n is a, c, g, or t
  misc_feature (30)..(30): n is a, c, g, or t
  misc_feature (33)..(33): n is a, c, g, or t
  misc_feature (36)..(36): n is a, c, g, or t
  misc_feature (39)..(39): n is a, c, g, or t
  misc_feature (48)..(48): n is a, c, g, or t
  misc_feature (54)..(54): n is a, c, g, or t
  misc_feature (66)..(66): n is a, c, g, or t
  misc_feature (75)..(75): n is a, c, g, or t
  misc_feature (87)..(87): n is a, c, g, or t
  misc_feature (90)..(90): n is a, c, g, or t
  misc_feature (96)..(96): n is a, c, g, or t
  misc_feature (102)..(102): n is a, c, g, or t
  misc_feature (105)..(105): n is a, c, g, or t
  misc_feature (111)..(111): n is a, c, g, or t
  misc_feature (117)..(117): n is a, c, g, or t
  misc_feature (141)..(141): n is a, c, g, or t
  misc_feature (144)..(144): n is a, c, g, or t
  misc_feature (147)..(147): n is a, c, g, or t
  misc_feature (150)..(150): n is a, c, g, or t
  misc_feature (153)..(153): n is a, c, g, or t
  misc_feature (162)..(162): n is a, c, g, or t
  misc_feature (165)..(165): n is a, c, g, or t
  misc_feature (168)..(168): n is a, c, g, or t
  misc_feature (174)..(174): n is a, c, g, or t
  misc_feature (177)..(177): n is a, c, g, or t
  misc_feature (192)..(192): n is a, c, g, or t
  misc_feature (195)..(195): n is a, c, g, or t
ggncarwsnytnacngtncarytnmgnytnggnccngcngayathytngarwsngaygaraayggnathathccngarcargaymgngtnathacncargtngtnathytngaygcngayaaraarcarathcartgygtngtnmgnccnytncarathytnmgngcngayggnacntgggaraayathggnggnatgaar

SEQ ID NO: 990 - DNA, 201 bp, Artificial Sequence
  PfC-CNA45
  misc_feature (3)..(3): n is a, c, g, or t
  misc_feature (9)..(9): n is a, c, g, or t
  misc_feature (12)..(12): n is a, c, g, or t
  misc_feature (15)..(15): n is a, c, g, or t
  misc_feature (18)..(18): n is a, c, g, or t
  misc_feature (24)..(24): n is a, c, g, or t
  misc_feature (27)..(27): n is a, c, g, or t
  misc_feature (30)..(30): n is a, c, g, or t
  misc_feature (33)..(33): n is a, c, g, or t
  misc_feature (36)..(36): n is a, c, g, or t
  misc_feature (39)..(39): n is a, c, g, or t
  misc_feature (48)..(48): n is a, c, g, or t
  misc_feature (54)..(54): n is a, c, g, or t
  misc_feature (63)..(63): n is a, c, g, or t
  misc_feature (66)..(66): n is a, c, g, or t
  misc_feature (75)..(75): n is a, c, g, or t
  misc_feature (87)..(87): n is a, c, g, or t
  misc_feature (90)..(90): n is a, c, g, or t
  misc_feature (96)..(96): n is a, c, g, or t
  misc_feature (102)..(102): n is a, c, g, or t
  misc_feature (105)..(105): n is a, c, g, or t
  misc_feature (111)..(111): n is a, c, g, or t
  misc_feature (117)..(117): n is a, c, g, or t
  misc_feature (141)..(141): n is a, c, g, or t
  misc_feature (144)..(144): n is a, c, g, or t
  misc_feature (147)..(147): n is a, c, g, or t
  misc_feature (150)..(150): n is a, c, g, or t
  misc_feature (153)..(153): n is a, c, g, or t
  misc_feature (162)..(162): n is a, c, g, or t
  misc_feature (165)..(165): n is a, c, g, or t
  misc_feature (168)..(168): n is a, c, g, or t
  misc_feature (174)..(174): n is a, c, g, or t
  misc_feature (177)..(177): n is a, c, g, or t
  misc_feature (192)..(192): n is a, c, g, or t
  misc_feature (195)..(195): n is a, c, g, or t
ggncarwsnytnacngtncarytnmgnytnggnccngcngayathytngarwsngaygarwsnggnathathccngarcargaymgngtnathacncargtngtnathytngaygcngayaaraarcarathcartgygtngtnmgnccnytncarathytnmgngcngayggnacntgggaraayathggnggnatgaar

SEQ ID NO: 991 - DNA, 201 bp, Artificial Sequence
  PfC-CNA46
  misc_feature (3)..(3): n is a, c, g, or t
  misc_feature (9)..(9): n is a, c, g, or t
  misc_feature (12)..(12): n is a, c, g, or t
  misc_feature (15)..(15): n is a, c, g, or t
  misc_feature (18)..(18): n is a, c, g, or t
  misc_feature (24)..(24): n is a, c, g, or t
  misc_feature (27)..(27): n is a, c, g, or t
  misc_feature (30)..(30): n is a, c, g, or t
  misc_feature (33)..(33): n is a, c, g, or t
  misc_feature (36)..(36): n is a, c, g, or t
  misc_feature (39)..(39): n is a, c, g, or t
  misc_feature (48)..(48): n is a, c, g, or t
  misc_feature (54)..(54): n is a, c, g, or t
  misc_feature (66)..(66): n is a, c, g, or t
  misc_feature (75)..(75): n is a, c, g, or t
  misc_feature (84)..(84): n is a, c, g, or t
  misc_feature (87)..(87): n is a, c, g, or t
  misc_feature (90)..(90): n is a, c, g, or t
  misc_feature (96)..(96): n is a, c, g, or t
  misc_feature (102)..(102): n is a, c, g, or t
  misc_feature (105)..(105): n is a, c, g, or t
  misc_feature (111)..(111): n is a, c, g, or t
  misc_feature (117)..(117): n is a, c, g, or t
  misc_feature (141)..(141): n is a, c, g, or t
  misc_feature (144)..(144): n is a, c, g, or t
  misc_feature (147)..(147): n is a, c, g, or t
  misc_feature (150)..(150): n is a, c, g, or t
  misc_feature (153)..(153): n is a, c, g, or t
  misc_feature (162)..(162): n is a, c, g, or t
  misc_feature (165)..(165): n is a, c, g, or t
  misc_feature (168)..(168): n is a, c, g, or t
  misc_feature (174)..(174): n is a, c, g, or t
  misc_feature (177)..(177): n is a, c, g, or t
  misc_feature (192)..(192): n is a, c, g, or t
  misc_feature (195)..(195): n is a, c, g, or t
ggncarwsnytnacngtncarytnmgnytnggnccngcngayathytngarwsngaygaraayggnathathccngarcargtnmgngtnathacncargtngtnathytngaygcngayaaraarcarathcartgygtngtnmgnccnytncarathytnmgngcngayggnacntgggaraayathggnggnatgaar

SEQ ID NO: 992 - DNA, 201 bp, Artificial Sequence
  PfC-CNA47
  misc_feature (3)..(3): n is a, c, g, or t
  misc_feature (9)..(9): n is a, c, g, or t
  misc_feature (12)..(12): n is a, c, g, or t
  misc_feature (15)..(15): n is a, c, g, or t
  misc_feature (18)..(18): n is a, c, g, or t
  misc_feature (24)..(24): n is a, c, g, or t
  misc_feature (27)..(27): n is a, c, g, or t
  misc_feature (30)..(30): n is a, c, g, or t
  misc_feature (33)..(33): n is a, c, g, or t
  misc_feature (36)..(36): n is a, c, g, or t
  misc_feature (39)..(39): n is a, c, g, or t
  misc_feature (48)..(48): n is a, c, g, or t
  misc_feature (54)..(54): n is a, c, g, or t
  misc_feature (66)..(66): n is a, c, g, or t
  misc_feature (75)..(75): n is a, c, g, or t
  misc_feature (87)..(87): n is a, c, g, or t
  misc_feature (90)..(90): n is a, c, g, or t
  misc_feature (96)..(96): n is a, c, g, or t
  misc_feature (102)..(102): n is a, c, g, or t
  misc_feature (105)..(105): n is a, c, g, or t
  misc_feature (111)..(111): n is a, c, g, or t
  misc_feature (117)..(117): n is a, c, g, or t
  misc_feature (141)..(141): n is a, c, g, or t
  misc_feature (144)..(144): n is a, c, g, or t
  misc_feature (147)..(147): n is a, c, g, or t
  misc_feature (150)..(150): n is a, c, g, or t
  misc_feature (153)..(153): n is a, c, g, or t
  misc_feature (162)..(162): n is a, c, g, or t
  misc_feature (165)..(165): n is a, c, g, or t
  misc_feature (168)..(168): n is a, c, g, or t
  misc_feature (174)..(174): n is a, c, g, or t
  misc_feature (177)..(177): n is a, c, g, or t
  misc_feature (192)..(192): n is a, c, g, or t
  misc_feature (195)..(195): n is a, c, g, or t
ggncarwsnytnacngtncarytnmgnytnggnccngcngayathytngarwsngaygaraayggnathathccngarcargayggngtnathacncargtngtnathytngaygcngayaaraarcarathcartgygtngtnmgnccnytncarathytnmgngcngayggnmgntgggaraayathggnggnatgaar

SEQ ID NO: 993 - DNA, 201 bp, Artificial Sequence
  PfC-CNA48
  misc_feature (3)..(3): n is a, c, g, or t
  misc_feature (9)..(9): n is a, c, g, or t
  misc_feature (12)..(12): n is a, c, g, or t
  misc_feature (15)..(15): n is a, c, g, or t
  misc_feature (18)..(18): n is a, c, g, or t
  misc_feature (24)..(24): n is a, c, g, or t
  misc_feature (27)..(27): n is a, c, g, or t
  misc_feature (30)..(30): n is a, c, g, or t
  misc_feature (33)..(33): n is a, c, g, or t
  misc_feature (36)..(36): n is a, c, g, or t
  misc_feature (39)..(39): n is a, c, g, or t
  misc_feature (48)..(48): n is a, c, g, or t
  misc_feature (54)..(54): n is a, c, g, or t
  misc_feature (66)..(66): n is a, c, g, or t
  misc_feature (75)..(75): n is a, c, g, or t
  misc_feature (87)..(87): n is a, c, g, or t
  misc_feature (90)..(90): n is a, c, g, or t
  misc_feature (96)..(96): n is a, c, g, or t
  misc_feature (102)..(102): n is a, c, g, or t
  misc_feature (105)..(105): n is a, c, g, or t
  misc_feature (111)..(111): n is a, c, g, or t
  misc_feature (117)..(117): n is a, c, g, or t
  misc_feature (144)..(144): n is a, c, g, or t
  misc_feature (147)..(147): n is a, c, g, or t
  misc_feature (150)..(150): n is a, c, g, or t
  misc_feature (153)..(153): n is a, c, g, or t
  misc_feature (162)..(162): n is a, c, g, or t
  misc_feature (165)..(165): n is a, c, g, or t
  misc_feature (168)..(168): n is a, c, g, or t
  misc_feature (174)..(174): n is a, c, g, or t
  misc_feature (177)..(177): n is a, c, g, or t
  misc_feature (192)..(192): n is a, c, g, or t
  misc_feature (195)..(195): n is a, c, g, or t
ggncarwsnytnacngtncarytnmgnytnggnccngcngayathytngarwsngaygaraayggnathathccngarcargaymgngtnathacncargtngtnathytngaygcngayaaraarcarathcartgyatggtnmgnccnytncarathytnmgngcngayggnmgntgggaraayathggnggnatgaar

SEQ ID NO: 994 - DNA, 201 bp, Artificial Sequence
  PfC-CNA49
  misc_feature (3)..(3): n is a, c, g, or t
  misc_feature (9)..(9): n is a, c, g, or t
  misc_feature (12)..(12): n is a, c, g, or t
  misc_feature (15)..(15): n is a, c, g, or t
  misc_feature (18)..(18): n is a, c, g, or t
  misc_feature (24)..(24): n is a, c, g, or t
  misc_feature (27)..(27): n is a, c, g, or t
  misc_feature (30)..(30): n is a, c, g, or t
  misc_feature (33)..(33): n is a, c, g, or t
  misc_feature (36)..(36): n is a, c, g, or t
  misc_feature (39)..(39): n is a, c, g, or t
  misc_feature (48)..(48): n is a, c, g, or t
  misc_feature (54)..(54): n is a, c, g, or t
  misc_feature (66)..(66): n is a, c, g, or t
  misc_feature (75)..(75): n is a, c, g, or t
  misc_feature (87)..(87): n is a, c, g, or t
  misc_feature (90)..(90): n is a, c, g, or t
  misc_feature (96)..(96): n is a, c, g, or t
  misc_feature (102)..(102): n is a, c, g, or t
  misc_feature (105)..(105): n is a, c, g, or t
  misc_feature (111)..(111): n is a, c, g, or t
  misc_feature (117)..(117): n is a, c, g, or t
  misc_feature (141)..(141): n is a, c, g, or t
  misc_feature (144)..(144): n is a, c, g, or t
  misc_feature (147)..(147): n is a, c, g, or t
  misc_feature (150)..(150): n is a, c, g, or t
  misc_feature (153)..(153): n is a, c, g, or t
  misc_feature (162)..(162): n is a, c, g, or t
  misc_feature (165)..(165): n is a, c, g, or t
  misc_feature (168)..(168): n is a, c, g, or t
  misc_feature (174)..(174): n is a, c, g, or t
  misc_feature (177)..(177): n is a, c, g, or t
  misc_feature (192)..(192): n is a, c, g, or t
  misc_feature (195)..(195): n is a, c, g, or t
ggncarwsnytnacngcncarytnmgnytnggnccngcngayathytngarwsngaygaraayggnathathccngarcargaymgngtnathacncargtngtnathytngaygcngayaaraarcarathcartgygtngtnmgnccnytncarathytnmgngcngayggnmgntgggaraayathggnggnatgaar

SEQ ID NO: 995 - DNA, 201 bp, Artificial Sequence
  PfC-CNA50
  misc_feature (3)..(3): n is a, c, g, or t
  misc_feature (9)..(9): n is a, c, g, or t
  misc_feature (12)..(12): n is a, c, g, or t
  misc_feature (15)..(15): n is a, c, g, or t
  misc_feature (18)..(18): n is a, c, g, or t
  misc_feature (24)..(24): n is a, c, g, or t
  misc_feature (27)..(27): n is a, c, g, or t
  misc_feature (30)..(30): n is a, c, g, or t
  misc_feature (33)..(33): n is a, c, g, or t
  misc_feature (36)..(36): n is a, c, g, or t
  misc_feature (39)..(39): n is a, c, g, or t
  misc_feature (48)..(48): n is a, c, g, or t
  misc_feature (54)..(54): n is a, c, g, or t
  misc_feature (66)..(66): n is a, c, g, or t
  misc_feature (75)..(75): n is a, c, g, or t
  misc_feature (84)..(84): n is a, c, g, or t
  misc_feature (87)..(87): n is a, c, g, or t
  misc_feature (90)..(90): n is a, c, g, or t
  misc_feature (96)..(96): n is a, c, g, or t
  misc_feature (102)..(102): n is a, c, g, or t
  misc_feature (105)..(105): n is a, c, g, or t
  misc_feature (111)..(111): n is a, c, g, or t
  misc_feature (117)..(117): n is a, c, g, or t
  misc_feature (141)..(141): n is a, c, g, or t
  misc_feature (144)..(144): n is a, c, g, or t
  misc_feature (147)..(147): n is a, c, g, or t
  misc_feature (150)..(150): n is a, c, g, or t
  misc_feature (153)..(153): n is a, c, g, or t
  misc_feature (162)..(162): n is a, c, g, or t
  misc_feature (165)..(165): n is a, c, g, or t
  misc_feature (168)..(168): n is a, c, g, or t
  misc_feature (174)..(174): n is a, c, g, or t
  misc_feature (177)..(177): n is a, c, g, or t
  misc_feature (192)..(192): n is a, c, g, or t
  misc_feature (195)..(195): n is a, c, g, or t
ggngarytnytnacngcncarytnmgnytnggnccngcngayathytngarwsngaygaraayggnathathccngarcargcnmgngtnathacncargtngtnathytngaygcngayaaraarcarathcartgygtngtnmgnccnytncarathytnmgngcngayggnacntgggaraayathggnggnatgaar

SEQ ID NO: 996 - DNA, 201 bp, Artificial Sequence
  PfC-CNA51
  misc_feature (3)..(3): n is a, c, g, or t
  misc_feature (9)..(9): n is a, c, g, or t
  misc_feature (12)..(12): n is a, c, g, or t
  misc_feature (15)..(15): n is a, c, g, or t
  misc_feature (18)..(18): n is a, c, g, or t
  misc_feature (24)..(24): n is a, c, g, or t
  misc_feature (27)..(27): n is a, c, g, or t
  misc_feature (30)..(30): n is a, c, g, or t
  misc_feature (33)..(33): n is a, c, g, or t
  misc_feature (36)..(36): n is a, c, g, or t
  misc_feature (39)..(39): n is a, c, g, or t
  misc_feature (48)..(48): n is a, c, g, or t
  misc_feature (54)..(54): n is a, c, g, or t
  misc_feature (66)..(66): n is a, c, g, or t
  misc_feature (75)..(75): n is a, c, g, or t
  misc_feature (84)..(84): n is a, c, g, or t
  misc_feature (87)..(87): n is a, c, g, or t
  misc_feature (90)..(90): n is a, c, g, or t
  misc_feature (96)..(96): n is a, c, g, or t
  misc_feature (102)..(102): n is a, c, g, or t
  misc_feature (105)..(105): n is a, c, g, or t
  misc_feature (111)..(111): n is a, c, g, or t
  misc_feature (117)..(117): n is a, c, g, or t
  misc_feature (141)..(141): n is a, c, g, or t
  misc_feature (144)..(144): n is a, c, g, or t
  misc_feature (147)..(147): n is a, c, g, or t
  misc_feature (150)..(150): n is a, c, g, or t
  misc_feature (153)..(153): n is a, c, g, or t
  misc_feature (162)..(162): n is a, c, g, or t
  misc_feature (165)..(165): n is a, c, g, or t
  misc_feature (168)..(168): n is a, c, g, or t
  misc_feature (174)..(174): n is a, c, g, or t
  misc_feature (177)..(177): n is a, c, g, or t
  misc_feature (192)..(192): n is a, c, g, or t
  misc_feature (195)..(195): n is a, c, g, or t
ggngarytnytnacngcncarytnmgnytnggnccngcngayathytngarwsngaygaraayggnathathccngarcargcnmgngtnathacncargtngtnathytngayacngayaaraarcarathcartgygtngtnmgnccnytncarathytnmgngcngayggnacntgggaraayathggnggnatgaar

SEQ ID NO: 997 - DNA, 201 bp, Artificial Sequence
  PfC-CNA52
  misc_feature (3)..(3): n is a, c, g, or t
  misc_feature (9)..(9): n is a, c, g, or t
  misc_feature (12)..(12): n is a, c, g, or t
  misc_feature (15)..(15): n is a, c, g, or t
  misc_feature (18)..(18): n is a, c, g, or t
  misc_feature (24)..(24): n is a, c, g, or t
  misc_feature (27)..(27): n is a, c, g, or t
  misc_feature (30)..(30): n is a, c, g, or t
  misc_feature (33)..(33): n is a, c, g, or t
  misc_feature (36)..(36): n is a, c, g, or t
  misc_feature (39)..(39): n is a, c, g, or t
  misc_feature (48)..(48): n is a, c, g, or t
  misc_feature (54)..(54): n is a, c, g, or t
  misc_feature (66)..(66): n is a, c, g, or t
  misc_feature (75)..(75): n is a, c, g, or t
  misc_feature (87)..(87): n is a, c, g, or t
  misc_feature (90)..(90): n is a, c, g, or t
  misc_feature (96)..(96): n is a, c, g, or t
  misc_feature (102)..(102): n is a, c, g, or t
  misc_feature (105)..(105): n is a, c, g, or t
  misc_feature (111)..(111): n is a, c, g, or t
  misc_feature (117)..(117): n is a, c, g, or t
  misc_feature (141)..(141): n is a, c, g, or t
  misc_feature (144)..(144): n is a, c, g, or t
  misc_feature (147)..(147): n is a, c, g, or t
  misc_feature (150)..(150): n is a, c, g, or t
  misc_feature (153)..(153): n is a, c, g, or t
  misc_feature (162)..(162): n is a, c, g, or t
  misc_feature (165)..(165): n is a, c, g, or t
  misc_feature (168)..(168): n is a, c, g, or t
  misc_feature (174)..(174): n is a, c, g, or t
  misc_feature (177)..(177): n is a, c, g, or t
  misc_feature (192)..(192): n is a, c, g, or t
  misc_feature (195)..(195): n is a, c, g, or t
ggngarytnytnacngcncarytnmgnytnggnccngcngayathytngarwsngaygaraayggnathathccngarcargaymgngtnathacncargtngtnathytngaygcngayaaraarcarathcartgygtngtnmgnccnytncarathytnmgngcngayggnacntgggaraayathggnggnatgaar

SEQ ID NO: 998 - DNA, 201 bp, Artificial Sequence
  PfC-CNA53
  misc_feature (3)..(3): n is a, c, g, or t
  misc_feature (9)..(9): n is a, c, g, or t
  misc_feature (12)..(12): n is a, c, g, or t
  misc_feature (15)..(15): n is a, c, g, or t
  misc_feature (18)..(18): n is a, c, g, or t
  misc_feature (24)..(24): n is a, c, g, or t
  misc_feature (27)..(27): n is a, c, g, or t
  misc_feature (30)..(30): n is a, c, g, or t
  misc_feature (33)..(33): n is a, c, g, or t
  misc_feature (36)..(36): n is a, c, g, or t
  misc_feature (39)..(39): n is a, c, g, or t
  misc_feature (48)..(48): n is a, c, g, or t
  misc_feature (54)..(54): n is a, c, g, or t
  misc_feature (66)..(66): n is a, c, g, or t
  misc_feature (75)..(75): n is a, c, g, or t
  misc_feature (87)..(87): n is a, c, g, or t
  misc_feature (90)..(90): n is a, c, g, or t
  misc_feature (96)..(96): n is a, c, g, or t
  misc_feature (102)..(102): n is a, c, g, or t
  misc_feature (105)..(105): n is a, c, g, or t
  misc_feature (111)..(111): n is a, c, g, or t
  misc_feature (117)..(117): n is a, c, g, or t
  misc_feature (141)..(141): n is a, c, g, or t
  misc_feature (144)..(144): n is a, c, g, or t
  misc_feature (147)..(147): n is a, c, g, or t
  misc_feature (150)..(150): n is a, c, g, or t
  misc_feature (153)..(153): n is a, c, g, or t
  misc_feature (162)..(162): n is a, c, g, or t
  misc_feature (165)..(165): n is a, c, g, or t
  misc_feature (168)..(168): n is a, c, g, or t
  misc_feature (174)..(174): n is a, c, g, or t
  misc_feature (177)..(177): n is a, c, g, or t
  misc_feature (192)..(192): n is a, c, g, or t
  misc_feature (195)..(195): n is a, c, g, or t
ggngarytnytnacngcncarytnmgnytnggnccngcngayathytngarwsngaygaraayggnathathccngarcargaymgngtnathacncargtngtnathytngaygcngayaaraarcarathcartgygtngtnmgnccnytncarathytnmgngcngayggnmgntgggaraayathggnggnatgaar

SEQ ID NO: 999 - DNA, 201 bp, Artificial Sequence
  PfC-CNA54
  misc_feature (3)..(3): n is a, c, g, or t
  misc_feature (9)..(9): n is a, c, g, or t
  misc_feature (12)..(12): n is a, c, g, or t
  misc_feature (15)..(15): n is a, c, g, or t
  misc_feature (18)..(18): n is a, c, g, or t
  misc_feature (24)..(24): n is a, c, g, or t
  misc_feature (27)..(27): n is a, c, g, or t
  misc_feature (30)..(30): n is a, c, g, or t
  misc_feature (33)..(33): n is a, c, g, or t
  misc_feature (36)..(36): n is a, c, g, or t
  misc_feature (39)..(39): n is a, c, g, or t
  misc_feature (48)..(48): n is a, c, g, or t
  misc_feature (54)..(54): n is a, c, g, or t
  misc_feature (66)..(66): n is a, c, g, or t
  misc_feature (75)..(75): n is a, c, g, or t
  misc_feature (87)..(87): n is a, c, g, or t
  misc_feature (90)..(90): n is a, c, g, or t
  misc_feature (96)..(96): n is a, c, g, or t
  misc_feature (102)..(102): n is a, c, g, or t
  misc_feature (105)..(105): n is a, c, g, or t
  misc_feature (111)..(111): n is a, c, g, or t
  misc_feature (117)..(117): n is a, c, g, or t
  misc_feature (141)..(141): n is a, c, g, or t
  misc_feature (144)..(144): n is a, c, g, or t
  misc_feature (147)..(147): n is a, c, g, or t
  misc_feature (150)..(150): n is a, c, g, or t
  misc_feature (153)..(153): n is a, c, g, or t
  misc_feature (162)..(162): n is a, c, g, or t
  misc_feature (165)..(165): n is a, c, g, or t
  misc_feature (168)..(168): n is a, c, g, or t
  misc_feature (174)..(174): n is a, c, g, or t
  misc_feature (177)..(177): n is a, c, g, or t
  misc_feature (189)..(189): n is a, c, g, or t
  misc_feature (192)..(192): n is a, c, g, or t
  misc_feature (195)..(195): n is a, c, g, or t
ggngarytnytnacngcncarytnmgnytnggnccngcngayathytngarwsngaygaraayggnathathccngarcargaymgngtnathacncargtngtnathytngaygcngayaaraarcarathcartgygtngtnmgnccnytncarathytnmgngcngayggngtntgggaraaygtnggnggnatgaar

SEQ ID NO: 1000 - DNA, 201 bp, Artificial Sequence
  PfC-CNA55
  misc_feature (3)..(3): n is a, c, g, or t
  misc_feature (6)..(6): n is a, c, g, or t
  misc_feature (9)..(9): n is a, c, g, or t
  misc_feature (12)..(12): n is a, c, g, or t
  misc_feature (15)..(15): n is a, c, g, or t
  misc_feature (18)..(18): n is a, c, g, or t
  misc_feature (24)..(24): n is a, c, g, or t
  misc_feature (27)..(27): n is a, c, g, or t
  misc_feature (30)..(30): n is a, c, g, or t
  misc_feature (33)..(33): n is a, c, g, or t
  misc_feature (36)..(36): n is a, c, g, or t
  misc_feature (39)..(39): n is a, c, g, or t
  misc_feature (48)..(48): n is a, c, g, or t
  misc_feature (54)..(54): n is a, c, g, or t
  misc_feature (66)..(66): n is a, c, g, or t
  misc_feature (75)..(75): n is a, c, g, or t
  misc_feature (87)..(87): n is a, c, g, or t
  misc_feature (90)..(90): n is a, c, g, or t
  misc_feature (96)..(96): n is a, c, g, or t
  misc_feature (102)..(102): n is a, c, g, or t
  misc_feature (105)..(105): n is a, c, g, or t
  misc_feature (111)..(111): n is a, c, g, or t
  misc_feature (117)..(117): n is a, c, g, or t
  misc_feature (141)..(141): n is a, c, g, or t
  misc_feature (144)..(144): n is a, c, g, or t
  misc_feature (147)..(147): n is a, c, g, or t
  misc_feature (150)..(150): n is a, c, g, or t
  misc_feature (153)..(153): n is a, c, g, or t
  misc_feature (162)..(162): n is a, c, g, or t
  misc_feature (165)..(165): n is a, c, g, or t
  misc_feature (168)..(168): n is a, c, g, or t
  misc_feature (174)..(174): n is a, c, g, or t
  misc_feature (177)..(177): n is a, c, g, or t
  misc_feature (192)..(192): n is a, c, g, or t
  misc_feature (195)..(195): n is a, c, g, or t
ggnggnytnytnacngcncarytnmgnytnggnccngcngayathytngarwsngaygaraayggnathathccngarcargaymgngtnathacncargtngtnathytngaygcngayaaraarcarathcartgygtngtnmgnccnytncarathytnmgngcngayggnacntgggaraayathggnggnatgaar

SEQ ID NO: 1001 - DNA, 201 bp, Artificial Sequence
  PfC-CNA56
  misc_feature (3)..(3): n is a, c, g, or t
  misc_feature (6)..(6): n is a, c, g, or t
  misc_feature (9)..(9): n is a, c, g, or t
  misc_feature (12)..(12): n is a, c, g, or t
  misc_feature (15)..(15): n is a, c, g, or t
  misc_feature (18)..(18): n is a, c, g, or t
  misc_feature (24)..(24): n is a, c, g, or t
  misc_feature (27)..(27): n is a, c, g, or t
  misc_feature (30)..(30): n is a, c, g, or t
  misc_feature (33)..(33): n is a, c, g, or t
  misc_feature (36)..(36): n is a, c, g, or t
  misc_feature (39)..(39): n is a, c, g, or t
  misc_feature (48)..(48): n is a, c, g, or t
  misc_feature (54)..(54): n is a, c, g, or t
  misc_feature (66)..(66): n is a, c, g, or t
  misc_feature (75)..(75): n is a, c, g, or t
  misc_feature (87)..(87): n is a, c, g, or t
  misc_feature (90)..(90): n is a, c, g, or t
  misc_feature (96)..(96): n is a, c, g, or t
  misc_feature (102)..(102): n is a, c, g, or t
  misc_feature (105)..(105): n is a, c, g, or t
  misc_feature (111)..(111): n is a, c, g, or t
  misc_feature (117)..(117): n is a, c, g, or t
  misc_feature (141)..(141): n is a, c, g, or t
  misc_feature (144)..(144): n is a, c, g, or t
  misc_feature (147)..(147): n is a, c, g, or t
  misc_feature (150)..(150): n is a, c, g, or t
  misc_feature (153)..(153): n is a, c, g, or t
  misc_feature (162)..(162): n is a, c, g, or t
  misc_feature (165)..(165): n is a, c, g, or t
  misc_feature (168)..(168): n is a, c, g, or t
  misc_feature (174)..(174): n is a, c, g, or t
  misc_feature (177)..(177): n is a, c, g, or t
  misc_feature (192)..(192): n is a, c, g, or t
  misc_feature (195)..(195): n is a, c, g, or t
ggnggnytnytnacngcncarytnmgnytnggnccngcngayathytngarwsngaygaraayggnathathccngarcargaymgngtnathacncargtngtnathytngaygcngayaaraarcarathcartgygtngtnmgnccnytncarathytnmgngcngayggnmgntgggaraayathggnggnatgaar

SEQ ID NO: 1002 - DNA, 201 bp, Artificial Sequence
  PfC-CNA57
  misc_feature (3)..(3): n is a, c, g, or t
  misc_feature (6)..(6): n is a, c, g, or t
  misc_feature (9)..(9): n is a, c, g, or t
  misc_feature (12)..(12): n is a, c, g, or t
  misc_feature (15)..(15): n is a, c, g, or t
  misc_feature (18)..(18): n is a, c, g, or t
  misc_feature (24)..(24): n is a, c, g, or t
  misc_feature (27)..(27): n is a, c, g, or t
  misc_feature (30)..(30): n is a, c, g, or t
  misc_feature (33)..(33): n is a, c, g, or t
  misc_feature (36)..(36): n is a, c, g, or t
  misc_feature (39)..(39): n is a, c, g, or t
  misc_feature (48)..(48): n is a, c, g, or t
  misc_feature (54)..(54): n is a, c, g, or t
  misc_feature (66)..(66): n is a, c, g, or t
  misc_feature (75)..(75): n is a, c, g, or t
  misc_feature (87)..(87): n is a, c, g, or t
  misc_feature (90)..(90): n is a, c, g, or t
  misc_feature (96)..(96): n is a, c, g, or t
  misc_feature (102)..(102): n is a, c, g, or t
  misc_feature (105)..(105): n is a, c, g, or t
  misc_feature (111)..(111): n is a, c, g, or t
  misc_feature (117)..(117): n is a, c, g, or t
  misc_feature (141)..(141): n is a, c, g, or t
  misc_feature (144)..(144): n is a, c, g, or t
  misc_feature (147)..(147): n is a, c, g, or t
  misc_feature (150)..(150): n is a, c, g, or t
  misc_feature (153)..(153): n is a, c, g, or t
  misc_feature (162)..(162): n is a, c, g, or t
  misc_feature (165)..(165): n is a, c, g, or t
  misc_feature (168)..(168): n is a, c, g, or t
  misc_feature (174)..(174): n is a, c, g, or t
  misc_feature (177)..(177): n is a, c, g, or t
  misc_feature (192)..(192): n is a, c, g, or t
  misc_feature (195)..(195): n is a, c, g, or t
ggnmgnwsnytnacngcncarytnmgnytnggnccngcngayathytngarwsngaygaraayggnathathccngarcargaymgngtnathacncargtngtnathytngaygcngayaaraarcarathcartgygtngtnmgnccnytncarathytnmgngcngayggnacntgggaraayathggnggnatgaar

SEQ ID NO: 1003 - DNA, 276 bp, Artificial Sequence
  PfC-CNA58
  misc_feature (3)..(3): n is a, c, g, or t
  misc_feature (6)..(6): n is a, c, g, or t
  misc_feature (9)..(9): n is a, c, g, or t
  misc_feature (21)..(21): n is a, c, g, or t
  misc_feature (27)..(27): n is a, c, g, or t
  misc_feature (30)..(30): n is a, c, g, or t
  misc_feature (42)..(42): n is a, c, g, or t
  misc_feature (45)..(45): n is a, c, g, or t
  misc_feature (48)..(48): n is a, c, g, or t
  misc_feature (51)..(51): n is a, c, g, or t
  misc_feature (54)..(54): n is a, c, g, or t
  misc_feature (63)..(63): n is a, c, g, or t
  misc_feature (72)..(72): n is a, c, g, or t
  misc_feature (75)..(75): n is a, c, g, or t
  misc_feature (78)..(78): n is a, c, g, or t
  misc_feature (87)..(87): n is a, c, g, or t
  misc_feature (90)..(90): n is a, c, g, or t
  misc_feature (96)..(96): n is a, c, g, or t
  misc_feature (99)..(99): n is a, c, g, or t
  misc_feature (102)..(102): n is a, c, g, or t
  misc_feature (105)..(105): n is a, c, g, or t
  misc_feature (108)..(108): n is a, c, g, or t
  misc_feature (111)..(111): n is a, c, g, or t
  misc_feature (114)..(114): n is a, c, g, or t
  misc_feature (120)..(120): n is a, c, g, or t
  misc_feature (126)..(126): n is a, c, g, or t
  misc_feature (129)..(129): n is a, c, g, or t
  misc_feature (147)..(147): n is a, c, g, or t
  misc_feature (162)..(162): n is a, c, g, or t
  misc_feature (168)..(168): n is a, c, g, or t
  misc_feature (174)..(174): n is a, c, g, or t
  misc_feature (183)..(183): n is a, c, g, or t
  misc_feature (189)..(189): n is a, c, g, or t
  misc_feature (192)..(192): n is a, c, g, or t
  misc_feature (195)..(195): n is a, c, g, or t
  misc_feature (198)..(198): n is a, c, g, or t
  misc_feature (201)..(201): n is a, c, g, or t
  misc_feature (204)..(204): n is a, c, g, or t
  misc_feature (207)..(207): n is a, c, g, or t
  misc_feature (216)..(216): n is a, c, g, or t
  misc_feature (231)..(231): n is a, c, g, or t
  misc_feature (234)..(234): n is a, c, g, or t
  misc_feature (237)..(237): n is a, c, g, or t
  misc_feature (252)..(252): n is a, c, g, or t
  misc_feature (258)..(258): n is a, c, g, or t
  misc_feature (261)..(261): n is a, c, g, or t
  misc_feature (270)..(270): n is a, c, g, or t
  misc_feature (273)..(273): n is a, c, g, or t
gtnccnggngarathtaywsnathggnacntayathathgcngcnytnggnccntayathacngayathggnmgnacntaycarccnggngaracngtnwsnggnwsnmgnytnaarmgntgygcnytnathaargaygaraayggnaaytayatgaargcnaayacngayggnathgayggnaayytnwsnwsngtnccnggnwsntggatggtntgyaaygarathacnwsnacnaaygayaaygarggnathggnytnttycarmgngcntay

SEQ ID NO: 1004 - DNA, 276 bp, Artificial Sequence
  PfC-CNA59
  misc_feature (3)..(3): n is a, c, g, or t
  misc_feature (6)..(6): n is a, c, g, or t
  misc_feature (9)..(9): n is a, c, g, or t
  misc_feature (21)..(21): n is a, c, g, or t
  misc_feature (27)..(27): n is a, c, g, or t
  misc_feature (30)..(30): n is a, c, g, or t
  misc_feature (42)..(42): n is a, c, g, or t
  misc_feature (45)..(45): n is a, c, g, or t
  misc_feature (48)..(48): n is a, c, g, or t
  misc_feature (51)..(51): n is a, c, g, or t
  misc_feature (54)..(54): n is a, c, g, or t
  misc_feature (63)..(63): n is a, c, g, or t
  misc_feature (72)..(72): n is a, c, g, or t
  misc_feature (75)..(75): n is a, c, g, or t
  misc_feature (78)..(78): n is a, c, g, or t
  misc_feature (87)..(87): n is a, c, g, or t
  misc_feature (90)..(90): n is a, c, g, or t
  misc_feature (96)..(96): n is a, c, g, or t
  misc_feature (99)..(99): n is a, c, g, or t
  misc_feature (102)..(102): n is a, c, g, or t
  misc_feature (105)..(105): n is a, c, g, or t
  misc_feature (108)..(108): n is a, c, g, or t
  misc_feature (111)..(111): n is a, c, g, or t
  misc_feature (114)..(114): n is a, c, g, or t
  misc_feature (120)..(120): n is a, c, g, or t
  misc_feature (126)..(126): n is a, c, g, or t
  misc_feature (129)..(129): n is a, c, g, or t
  misc_feature (147)..(147): n is a, c, g, or t
  misc_feature (162)..(162): n is a, c, g, or t
  misc_feature (168)..(168): n is a, c, g, or t
  misc_feature (174)..(174): n is a, c, g, or t
  misc_feature (183)..(183): n is a, c, g, or t
  misc_feature (189)..(189): n is a, c, g, or t
  misc_feature (192)..(192): n is a, c, g, or t
  misc_feature (195)..(195): n is a, c, g, or t
  misc_feature (198)..(198): n is a, c, g, or t
  misc_feature (201)..(201): n is a, c, g, or t
  misc_feature (204)..(204): n is a, c, g, or t
  misc_feature (207)..(207): n is a, c, g, or t
  misc_feature (216)..(216): n is a, c, g, or t
  misc_feature (231)..(231): n is a, c, g, or t
  misc_feature (234)..(234): n is a, c, g, or t
  misc_feature (237)..(237): n is a, c, g, or t
  misc_feature (252)..(252): n is a, c, g, or t
  misc_feature (258)..(258): n is a, c, g, or t
  misc_feature (261)..(261): n is a, c, g, or t
  misc_feature (270)..(270): n is a, c, g, or t
  misc_feature (273)..(273): n is a, c, g, or t
gtnccnggngarathtaywsnathggnacntayathathgcngcnytnggnccntayathacngayathggnmgnacntaycarccnggngaracngtnwsnggnwsnmgnytnaarmgntgygcnytnathaargaygaraayggnaaytayatgaargcnaayacngayggnathgayggnathytnwsnwsngtnccnggnwsntggatggtntgyaaygarathacnwsnacnaaygayaaygarwsnathggnytnttycarmgngcntay

SEQ ID NO: 1005 - DNA, 276 bp, Artificial Sequence
  PfC-CNA60
  misc_feature (3)..(3): n is a, c, g, or t
  misc_feature (6)..(6): n is a, c, g, or t
  misc_feature (9)..(9): n is a, c, g, or t
  misc_feature (21)..(21): n is a, c, g, or t
  misc_feature (27)..(27): n is a, c, g, or t
  misc_feature (30)..(30): n is a, c, g, or t
  misc_feature (42)..(42): n is a, c, g, or t
  misc_feature (45)..(45): n is a, c, g, or t
  misc_feature (48)..(48): n is a, c, g, or t
  misc_feature (51)..(51): n is a, c, g, or t
  misc_feature (54)..(54): n is a, c, g, or t
  misc_feature (60)..(60): n is a, c, g, or t
  misc_feature (63)..(63): n is a, c, g, or t
  misc_feature (72)..(72): n is a, c, g, or t
  misc_feature (75)..(75): n is a, c, g, or t
  misc_feature (78)..(78): n is a, c, g, or t
  misc_feature (87)..(87): n is a, c, g, or t
  misc_feature (90)..(90): n is a, c, g, or t
  misc_feature (96)..(96): n is a, c, g, or t
  misc_feature (99)..(99): n is a, c, g, or t
  misc_feature (105)..(105): n is a, c, g, or t
  misc_feature (108)..(108): n is a, c, g, or t
  misc_feature (111)..(111): n is a, c, g, or t
  misc_feature (114)..(114): n is a, c, g, or t
  misc_feature (120)..(120): n is a, c, g, or t
  misc_feature (126)..(126): n is a, c, g, or t
  misc_feature (141)..(141): n is a, c, g, or t
  misc_feature (144)..(144): n is a, c, g, or t
  misc_feature (147)..(147): n is a, c, g, or t
  misc_feature (162)..(162): n is a, c, g, or t
  misc_feature (168)..(168): n is a, c, g, or t
  misc_feature (174)..(174): n is a, c, g, or t
  misc_feature (183)..(183): n is a, c, g, or t
  misc_feature (189)..(189): n is a, c, g, or t
  misc_feature (192)..(192): n is a, c, g, or t
  misc_feature (195)..(195): n is a, c, g, or t
  misc_feature (198)..(198): n is a, c, g, or t
  misc_feature (201)..(201): n is a, c, g, or t
  misc_feature (204)..(204): n is a, c, g, or t
  misc_feature (207)..(207): n is a, c, g, or t
  misc_feature (216)..(216): n is a, c, g, or t
  misc_feature (231)..(231): n is a, c, g, or t
  misc_feature (234)..(234): n is a, c, g, or t
  misc_feature (237)..(237): n is a, c, g, or t
  misc_feature (252)..(252): n is a, c, g, or t
  misc_feature (258)..(258): n is a, c, g, or t
  misc_feature (261)..(261): n is a, c, g, or t
  misc_feature (270)..(270): n is a, c, g, or t
  misc_feature (273)..(273): n is a, c, g, or t
gtnccnggngarathtaywsnathggnacntayathathgcngcnytngcnccntayacnacngayathggnmgnacntaycarccnggngaracngtncarggnwsnmgnytnaarmgntgygcnathathaargaygcnwsnggnaaytayatgaargcnaayacngayggnathgayggnaayytnwsnwsngtnccnggnwsntggatggtntgyaaygarathacnwsnacnaaygayaaygarggnathggnytnttycarmgngcntay

SEQ ID NO: 1006 - DNA, 282 bp, Artificial Sequence
  PfC-CNA61
  misc_feature (3)..(3): n is a, c, g, or t
  misc_feature (6)..(6): n is a, c, g, or t
  misc_feature (18)..(18): n is a, c, g, or t
  misc_feature (21)..(21): n is a, c, g, or t
  misc_feature (24)..(24): n is a, c, g, or t
  misc_feature (27)..(27): n is a, c, g, or t
  misc_feature (33)..(33): n is a, c, g, or t
  misc_feature (39)..(39): n is a, c, g, or t
  misc_feature (42)..(42): n is a, c, g, or t
  misc_feature (48)..(48): n is a, c, g, or t
  misc_feature (51)..(51): n is a, c, g, or t
  misc_feature (54)..(54): n is a, c, g, or t
  misc_feature (60)..(60): n is a, c, g, or t
  misc_feature (66)..(66): n is a, c, g, or t
  misc_feature (69)..(69): n is a, c, g, or t
  misc_feature (90)..(90): n is a, c, g, or t
  misc_feature (102)..(102): n is a, c, g, or t
  misc_feature (108)..(108): n is a, c, g, or t
  misc_feature (111)..(111): n is a, c, g, or t
  misc_feature (117)..(117): n is a, c, g, or t
  misc_feature (123)..(123): n is a, c, g, or t
  misc_feature (126)..(126): n is a, c, g, or t
  misc_feature (129)..(129): n is a, c, g, or t
  misc_feature (132)..(132): n is a, c, g, or t
  misc_feature (135)..(135): n is a, c, g, or t
  misc_feature (141)..(141): n is a, c, g, or t
  misc_feature (144)..(144): n is a, c, g, or t
  misc_feature (147)..(147): n is a, c, g, or t
  misc_feature (153)..(153): n is a, c, g, or t
  misc_feature (159)..(159): n is a, c, g, or t
  misc_feature (168)..(168): n is a, c, g, or t
  misc_feature (171)..(171): n is a, c, g, or t
  misc_feature (177)..(177): n is a, c, g, or t
  misc_feature (183)..(183): n is a, c, g, or t
  misc_feature (186)..(186): n is a, c, g, or t
  misc_feature (189)..(189): n is a, c, g, or t
  misc_feature (195)..(195): n is a, c, g, or t
  misc_feature (198)..(198): n is a, c, g, or t
  misc_feature (204)..(204): n is a, c, g, or t
  misc_feature (207)..(207): n is a, c, g, or t
  misc_feature (210)..(210): n is a, c, g, or t
  misc_feature (213)..(213): n is a, c, g, or t
  misc_feature (216)..(216): n is a, c, g, or t
  misc_feature (219)..(219): n is a, c, g, or t
  misc_feature (222)..(222): n is a, c, g, or t
  misc_feature (225)..(225): n is a, c, g, or t
  misc_feature (228)..(228): n is a, c, g, or t
  misc_feature (231)..(231): n is a, c, g, or t
  misc_feature (246)..(246): n is a, c, g, or t
  misc_feature (252)..(252): n is a, c, g, or t
  misc_feature (255)..(255): n is a, c, g, or t
  misc_feature (261)..(261): n is a, c, g, or t
  misc_feature (264)..(264): n is a, c, g, or t
  misc_feature (267)..(267): n is a, c, g, or t
  misc_feature (276)..(276): n is a, c, g, or t
  misc_feature (282)..(282): n is a, c, g, or t
wsnacngaraartaygcngtnggnwsnttyytnttyggnwsnathwsnacnytngarwsngarwsngcnathaargaraayathaayggngaraarathacngargtngcnathytntaymgngtnggngtnacntaywsnccnacnttywsnathgtncayaaygcnggnaaywsnathccnggnacntggmgngcnttygtnwsngcnytnwsnytnggngcnccnggntaygaygarcaracnatgacnacnaayytnacnytnttycarmgnathgtn

SEQ ID NO: 1007 - DNA, 3042 bp, Homo sapiens
ggcccgatgggcccgagcggcccgcgcggcctgccgggcccgccgggcgcgccgggcccgcagggctttcagggcccgccgggcgaaccgggcgaaccgggcgcgagcggcccgatgggcccgcgcggcccgccgggcccgccgggcaaaaacggcgatgatggcgaagcgggcaaaccgggccgcccgggcgaacgcggcccgccgggcccgcagggcgcgcgcggcctgccgggcaccgcgggcctgccgggcatgaaaggccatcgcggctttagcggcctggatggcgcgaaaggcgatgcgggcccggcgggcccgaaaggcgaaccgggcagcccgggcgaaaacggcgcgccgggccagatgggcccgcgcggcctgccgggcgaacgcggccgcccgggcgcgccgggcccggcgggcgcgcgcggcaacgatggcgcgaccggcgcggcgggcccgccgggcccgaccggcccggcgggcccgccgggctttccgggcgcggtgggcgcgaaaggcgaagcgggcccgcagggcccgcgcggcagcgaaggcccgcagggcgtgcgcggcgaaccgggcccgccgggcccggcgggcgcggcgggcccggcgggcaacccgggcgcggatggccagccgggcgcgaaaggcgcgaacggcgcgccgggcattgcgggcgcgccgggctttccgggcgcgcgcggcccgagcggcccgcagggcccgggcggcccgccgggcccgaaaggcaacagcggcgaaccgggcgcgccgggcagcaaaggcgataccggcgcgaaaggcgaaccgggcccggtgggcgtgcagggcccgccgggcccggcgggcgaagaaggcaaacgcggcgcgcgcggcgaaccgggcccgaccggcctgccgggcccgccgggcgaacgcggcggcccgggcagccgcggctttccgggcgcggatggcgtggcgggcccgaaaggcccggcgggcgaacgcggcagcccgggcccggcgggcccgaaaggcagcccgggcgaagcgggccgcccgggcgaagcgggcctgccgggcgcgaaaggcctgaccggcagcccgggcagcccgggcccggatggcaaaaccggcccgccgggcccggcgggccaggatggccgcccgggcccgccgggcccgccgggcgcgcgcggccaggcgggcgtgatgggctttccgggcccgaaaggcgcggcgggcgaaccgggcaaagcgggcgaacgcggcgtgccgggcccgccgggcgcggtgggcccggcgggcaaagatggcgaagcgggcgcgcagggcccgccgggcccggcgggcccggcgggcgaacgcggcgaacagggcccggcgggcagcccgggctttcagggcctgccgggcccggcgggcccgccgggcgaagcgggcaaaccgggcgaacagggcgtgccgggcgatctgggcgcgccgggcccgagcggcgcgcgcggcgaacgcggctttccgggcgaacgcggcgtgcagggcccgccgggcccggcgggcccgcgcggcgcgaacggcgcgccgggcaacgatggcgcgaaaggcgatgcgggcgcgccgggcgcgccgggcagccagggcgcgccgggcctgcagggcatgccgggcgaacgcggcgcggcgggcctgccgggcccgaaaggcgatcgcggcgatgcgggcccgaaaggcgcggatggcagcccgggcaaagatggcgtgcgcggcctgaccggcccgattggcccgccgggcccggcgggcgcgccgggcgataaaggcgaaagcggcccgagcggcccggcgggcccgaccggcgcgcgcggcgcgccgggcgatcgcggcgaaccgggcccgccgggcccggcgggctttgcgggcccgccgggcgcggatggccagccgggcgcgaaaggcgaaccgggcgatgcgggcgcgaaaggcgatgcgggcccgccgggcccggcgggcccggcgggcccgccgggcccgattggcaacgtgggcgcgccgggcgcgaaaggcgcgcgcggcagcgcgggcccgccgggcgcgaccggctttccgggcgcggcgggccgcgtgggcccgccgggcccgagcggcaacgcgggcccgccgggcccgccgggcccggcgggcaaagaaggcggcaaaggcccgcgcggcgaaaccggcccggcgggccgcccgggcgaagtgggcccgccgggcccgccgggcccggcgggcgaaaaaggcagcccgggcgcggatggcccggcgggcgcgccgggcaccccgggcccgcagggcattgcgggccagcgcggcgtggtgggcctgccgggccagcgcggcgaacgcggctttccgggcctgccgggcccgagcggcgaaccgggcaaacagggcccgagcggcgcgagcggcgaacgcggcccgccgggcccgatgggcccgccgggcctggcgggcccgccgggcgaaagcggccgcgaaggcgcgccgggcgcggaaggcagcccgggccgcgatggcagcccgggcgcgaaaggcgatcgcggcgaaaccggcccggcgggcccgccgggcgcgccgggcgcgccgggcgcgccgggcccggtgggcccggcgggcaaaagcggcgatcgcggcgaaaccggcccggcgggcccgaccggcccggtgggcccggtgggcgcgcgcggcccggcgggcccgcagggcccgcgcggcgataaaggcgaaaccggcgaacagggcgatcgcggcattaaaggccatcgcggctttagcggcctgcagggcccgccgggcccgccgggcagcccgggcgaacagggcccgagcggcgcgagcggcccggcgggcccgcgcggcccgccgggcagcgcgggcgcgccgggcaaagatggcctgaacggcctgccgggcccgattggcccgccgggcccgcgcggccgcaccggcgatgcgggcccggtgggcccgccgggcccgccgggcccgccgggcccgccgggcccgccg

SEQ ID NO: 1008 - DNA, 3042 bp, Homo sapiens
ggcccgatgggcctgatgggcccgcgcggcccgccgggcgcggcgggcgcgccgggcccgcagggctttcagggcccggcgggcgaaccgggcgaaccgggccagaccggcccggcgggcgcgcgcggcccggcgggcccgccgggcaaagcgggcgaagatggccatccgggcaaaccgggccgcccgggcgaacgcggcgtggtgggcccgcagggcgcgcgcggctttccgggcaccccgggcctgccgggctttaaaggcattcgcggccataacggcctggatggcctgaaaggccagccgggcgcgccgggcgtgaaaggcgaaccgggcgcgccgggcgaaaacggcaccccgggccagaccggcgcgcgcggcctgccgggcgaacgcggccgcgtgggcgcgccgggcccggcgggcgcgcgcggcagcgatggcagcgtgggcccggtgggcccggcgggcccgattggcagcgcgggcccgccgggctttccgggcgcgccgggcccgaaaggcgaaattggcgcggtgggcaacgcgggcccggcgggcccggcgggcccgcgcggcgaagtgggcctgccgggcctgagcggcccggtgggcccgccgggcaacccgggcgcgaacggcctgaccggcgcgaaaggcgcggcgggcctgccgggcgtggcgggcgcgccgggcctgccgggcccgcgcggcattccgggcccggtgggcgcggcgggcgcgaccggcgcgcgcggcctggtgggcgaaccgggcccggcgggcagcaaaggcgaaagcggcaacaaaggcgaaccgggcagcgcgggcccgcagggcccgccgggcccgagcggcgaagaaggcaaacgcggcccgaacggcgaagcgggcagcgcgggcccgccgggcccgccgggcctgcgcggcagcccgggcagccgcggcctgccgggcgcggatggccgcgcgggcgtgatgggcccgccgggcagccgcggcgcgagcggcccggcgggcgtgcgcggcccgaacggcgatgcgggccgcccgggcgaaccgggcctgatgggcccgcgcggcctgccgggcagcccgggcaacattggcccggcgggcaaagaaggcccggtgggcctgccgggcattgatggccgcccgggcccgattggcccggcgggcgcgcgcggcgaaccgggcaacattggctttccgggcccgaaaggcccgaccggcgatccgggcaaaaacggcgataaaggccatgcgggcctggcgggcgcgcgcggcgcgccgggcccggatggcaacaacggcgcgcagggcccgccgggcccgcagggcgtgcagggcggcaaaggcgaacagggcccgccgggcccgccgggctttcagggcctgccgggcccgagcggcccggcgggcgaagtgggcaaaccgggcgaacgcggcctgcatggcgaatttggcctgccgggcccggcgggcccgcgcggcgaacgcggcccgccgggcgaaagcggcgcggcgggcccgaccggcccgattggcagccgcggcccgagcggcccgccgggcccggatggcaacaaaggcgaaccgggcgtggtgggcgcggtgggcaccgcgggcccgagcggcccgagcggcctgccgggcgaacgcggcgcggcgggcattccgggcggcaaaggcgaaaaaggcgaaccgggcctgcgcggcgaaattggcaacccgggccgcgatggcgcgcgcggcgcgccgggcgcggtgggcgcgccgggcccggcgggcgcgaccggcgatcgcggcgaagcgggcgcggcgggcccggcgggcccggcgggcccgcgcggcagcccgggcgaacgcggcgaagtgggcccggcgggcccgaacggctttgcgggcccggcgggcgcggcgggccagccgggcgcgaaaggcgaacgcggcgcgaaaggcccgaaaggcgaaaacggcgtggtgggcccgaccggcccggtgggcgcggcgggcccggcgggcccgaacggcccgccgggcccggcgggcagccgcggcgatggcggcccgccgggcatgaccggctttccgggcgcggcgggccgcaccggcccgccgggcccgagcggcattagcggcccgccgggcccgccgggcccggcgggcaaagaaggcctgcgcggcccgcgcggcgatcagggcccggtgggccgcaccggcgaagtgggcgcggtgggcccgccgggctttgcgggcgaaaaaggcccgagcggcgaagcgggcaccgcgggcccgccgggcaccccgggcccgcagggcctgctgggcgcgccgggcattctgggcctgccgggcagccgcggcgaacgcggcctgccgggcgtggcgggcgcggtgggcgaaccgggcccgctgggcattgcgggcccgccgggcgcgcgcggcccgccgggcgcggtgggcagcccgggcgtgaacggcgcgccgggcgaagcgggccgcgatggcaacccgggcaacgatggcccgccgggccgcgatggccagccgggccataaaggcgaacgcggctatccgggcaacattggcccggtgggcgcggcgggcgcgccgggcccgcatggcccggtgggcccggcgggcaaacatggcaaccgcggcgaaaccggcccgagcggcccggtgggcccggcgggcgcggtgggcccgcgcggcccgagcggcccgcagggcattcgcggcgataaaggcgaaccgggcgaaaaaggcccgcgcggcctgccgggcctgaaaggccataacggcctgcagggcctgccgggcattgcgggccatcatggcgatcagggcgcgccgggcagcgtgggcccggcgggcccgcgcggcccggcgggcccgagcggcccggcgggcaaagatggccgcaccggccatccgggcaccgtgggcccggcgggcattcgcggcccgcagggccatcagggcccggcgggcccgccgggcccgccgggcccgccgggcccgccgggcgtgagc

SEQ ID NO: 1009 - DNA, 3042 bp, Homo sapiens
ggcccgatgggcccgatgggcccgcgcggcccgccgggcccggcgggcgcgccgggcccgcagggctttcagggcaacccgggcgaaccgggcgaaccgggcgtgagcggcccgatgggcccgcgcggcccgccgggcccgccgggcaaaccgggcgatgatggcgaagcgggcaaaccgggcaaagcgggcgaacgcggcccgccgggcccgcagggcgcgcgcggctttccgggcaccccgggcctgccgggcgtgaaaggccatcgcggctatccgggcctggatggcgcgaaaggcgaagcgggcgcgccgggcgtgaaaggcgaaagcggcagcccgggcgaaaacggcagcccgggcccgatgggcccgcgcggcctgccgggcgaacgcggccgcaccggcccggcgggcgcggcgggcgcgcgcggcaacgatggccagccgggcccggcgggcccgccgggcccggtgggcccggcgggcggcccgggctttccgggcgcgccgggcgcgaaaggcgaagcgggcccgaccggcgcgcgcggcccggaaggcgcgcagggcccgcgcggcgaaccgggcaccccgggcagcccgggcccggcgggcgcgagcggcaacccgggcaccgatggcattccgggcgcgaaaggcagcgcgggcgcgccgggcattgcgggcgcgccgggctttccgggcccgcgcggcccgccgggcccgcagggcgcgaccggcccgctgggcccgaaaggccagaccggcgaaccgggcattgcgggctttaaaggcgaacagggcccgaaaggcgaaccgggcccggcgggcccgcagggcgcgccgggcccggcgggcgaagaaggcaaacgcggcgcgcgcggcgaaccgggcggcgtgggcccgattggcccgccgggcgaacgcggcgcgccgggcaaccgcggctttccgggccaggatggcctggcgggcccgaaaggcgcgccgggcgaacgcggcccgagcggcctggcgggcccgaaaggcgcgaacggcgatccgggccgcccgggcgaaccgggcctgccgggcgcgcgcggcctgaccggccgcccgggcgatgcgggcccgcagggcaaagtgggcccgagcggcgcgccgggcgaagatggccgcccgggcccgccgggcccgcagggcgcgcgcggccagccgggcgtgatgggctttccgggcccgaaaggcgcgaacggcgaaccgggcaaagcgggcgaaaaaggcctgccgggcgcgccgggcctgcgcggcctgccgggcaaagatggcgaaaccggcgcggcgggcccgccgggcccggcgggcccggcgggcgaacgcggcgaacagggcgcgccgggcccgagcggctttcagggcctgccgggcccgccgggcccgccgggcgaaggcggcaaaccgggcgatcagggcgtgccgggcgaagcgggcgcgccgggcctggtgggcccgcgcggcgaacgcggctttccgggcgaacgcggcagcccgggcgcgcagggcctgcagggcccgcgcggcctgccgggcaccccgggcaccgatggcccgaaaggcgcgagcggcccggcgggcccgccgggcgcgcagggcccgccgggcctgcagggcatgccgggcgaacgcggcgcggcgggcattgcgggcccgaaaggcgatcgcggcgatgtgggcgaaaaaggcccggaaggcgcgccgggcaaagatggcggccgcggcctgaccggcccgattggcccgccgggcccggcgggcgcgaacggcgaaaaaggcgaagtgggcccgccgggcccggcgggcagcgcgggcgcgcgcggcgcgccgggcgaacgcggcgaaaccggcccgccgggcccggcgggctttgcgggcccgccgggcgcggatggccagccgggcgcgaaaggcgaacagggcgaagcgggccagaaaggcgatgcgggcgcgccgggcccgcagggcccgagcggcgcgccgggcccgcagggcccgaccggcgtgaccggcccgaaaggcgcgcgcggcgcgcagggcccgccgggcgcgaccggctttccgggcgcggcgggccgcgtgggcccgccgggcagcaacggcaacccgggcccgccgggcccgccgggcccgagcggcaaagatggcccgaaaggcgcgcgcggcgatagcggcccgccgggccgcgcgggcgaaccgggcctgcagggcccggcgggcccgccgggcgaaaaaggcgaaccgggcgatgatggcccgagcggcgcggaaggcccgccgggcccgcagggcctggcgggccagcgcggcattgtgggcctgccgggccagcgcggcgaacgcggctttccgggcctgccgggcccgagcggcgaaccgggcaaacagggcgcgccgggcgcgagcggcgatcgcggcccgccgggcccggtgggcccgccgggcctgaccggcccggcgggcgaaccgggccgcgaaggcagcccgggcgcggatggcccgccgggccgcgatggcgcggcgggcgtgaaaggcgatcgcggcgaaaccggcgcggtgggcgcgccgggcgcgccgggcccgccgggcagcccgggcccggcgggcccgaccggcaaacagggcgatcgcggcgaagcgggcgcgcagggcccgatgggcccgagcggcccggcgggcgcgcgcggcattcagggcccgcagggcccgcgcggcgataaaggcgaagcgggcgaaccgggcgaacgcggcctgaaaggccatcgcggctttaccggcctgcagggcctgccgggcccgccgggcccgagcggcgatcagggcgcgagcggcccggcgggcccgagcggcccgcgcggcccgccgggcccggtgggcccgagcggcaaagatggcgcgaacggcattccgggcccgattggcccgccgggcccgcgcggccgcagcggcgaaaccggcccggcgggcccgccgggcaacccgggcccgccgggcccgccgggcccgccg

SEQ ID NO: 1010 - DNA, 3087 bp, Homo sapiens
ggcctggcgggctatccgggcccggcgggcccgccgggcccgccgggcccgccgggcaccagcggccatccgggcagcccgggcagcccgggctatcagggcccgccgggcgaaccgggccaggcgggcccgagcggcccgccgggcccgccgggcgcgattggcccgagcggcccggcgggcaaagatggcgaaagcggccgcccgggccgcccgggcgaacgcggcctgccgggcccgccgggcattaaaggcccggcgggcattccgggctttccgggcatgaaaggccatcgcggctttgatggccgcaacggcgaaaaaggcgaaaccggcgcgccgggcctgaaaggcgaaaacggcctgccgggcgaaaacggcgcgccgggcccgatgggcccgcgcggcgcgccgggcgaacgcggccgcccgggcctgccgggcgcggcgggcgcgcgcggcaacgatggcgcgcgcggcagcgatggccagccgggcccgccgggcccgccgggcaccgcgggctttccgggcagcccgggcgcgaaaggcgaagtgggcccggcgggcagcccgggcagcaacggcgcgccgggccagcgcggcgaaccgggcccgcagggccatgcgggcgcgcagggcccgccgggcccgccgggcattaacggcagcccgggcggcaaaggcgaaatgggcccggcgggcattccgggcgcgccgggcctgatgggcgcgcgcggcccgccgggcccggcgggcgcgaacggcgcgccgggcctgcgcggcggcgcgggcgaaccgggcaaaaacggcgcgaaaggcgaaccgggcccgcgcggcgaacgcggcgaagcgggcattccgggcgtgccgggcgcgaaaggcgaagatggcaaagatggcagcccgggcgaaccgggcgcgaacggcctgccgggcgcggcgggcgaacgcggcgcgccgggctttcgcggcccggcgggcccgaacggcattccgggcgaaaaaggcccggcgggcgaacgcggcgcgccgggcccggcgggcccgcgcggcgcggcgggcgaaccgggccgcgatggcgtgccgggcggcccgggcatgcgcggcatgccgggcagcccgggcggcccgggcagcgatggcaaaccgggcccgccgggcagccagggcgaaagcggccgcccgggcccgccgggcccgagcggcccgcgcggccagccgggcgtgatgggctttccgggcccgaaaggcaacgatggcgcgccgggcaaaaacggcgaacgcggcggcccgggcggcccgggcccgcagggcccgccgggcaaaaacggcgaaaccggcccgcagggcccgccgggcccgaccggcccgggcggcgataaaggcgataccggcccgccgggcccgcagggcctgcagggcctgccgggcaccggcggcccgccgggcgaaaacggcaaaccgggcgaaccgggcccgaaaggcgatgcgggcgcgccgggcgcgccgggcggcaaaggcgatgcgggcgcgccgggcgaacgcggcccgccgggcctggcgggcgcgccgggcctgcgcggcggcgcgggcccgccgggcccggaaggcggcaaaggcgcggcgggcccgccgggcccgccgggcgcggcgggcaccccgggcctgcagggcatgccgggcgaacgcggcggcctgggcagcccgggcccgaaaggcgataaaggcgaaccgggcggcccgggcgcggatggcgtgccgggcaaagatggcccgcgcggcccgaccggcccgattggcccgccgggcccggcgggccagccgggcgataaaggcgaaggcggcgcgccgggcctgccgggcattgcgggcccgcgcggcagcccgggcgaacgcggcgaaaccggcccgccgggcccggcgggctttccgggcgcgccgggccagaacggcgaaccgggcggcaaaggcgaacgcggcgcgccgggcgaaaaaggcgaaggcggcccgccgggcgtggcgggcccgccgggcggcagcggcccggcgggcccgccgggcccgcagggcgtgaaaggcgaacgcggcagcccgggcggcccgggcgcggcgggctttccgggcgcgcgcggcctgccgggcccgccgggcagcaacggcaacccgggcccgccgggcccgagcggcagcccgggcaaagatggcccgccgggcccggcgggcaacaccggcgcgccgggcagcccgggcgtgagcggcccgaaaggcgatgcgggccagccgggcgaaaaaggcagcccgggcgcgcagggcccgccgggcgcgccgggcccgctgggcattgcgggcattaccggcgcgcgcggcctggcgggcccgccgggcatgccgggcccgcgcggcagcccgggcccgcagggcgtgaaaggcgaaagcggcaaaccgggcgcgaacggcctgagcggcgaacgcggcccgccgggcccgcagggcctgccgggcctggcgggcaccgcgggcgaaccgggccgcgatggcaacccgggcagcgatggcctgccgggccgcgatggcagcccgggcggcaaaggcgatcgcggcgaaaacggcagcccgggcgcgccgggcgcgccgggccatccgggcccgccgggcccggtgggcccggcgggcaaaagcggcgatcgcggcgaaagcggcccggcgggcccggcgggcgcgccgggcccggcgggcagccgcggcgcgccgggcccgcagggcccgcgcggcgataaaggcgaaaccggcgaacgcggcgcggcgggcattaaaggccatcgcggctttccgggcaacccgggcgcgccgggcagcccgggcccggcgggccagcagggcgcgattggcagcccgggcccggcgggcccgcgcggcccggtgggcccgagcggcccgccgggcaaagatggcaccagcggccatccgggcccgattggcccgccgggcccgcgcggcaaccgcggcgaacgcggcagcgaaggcagcccgggccatccgggccagccgggcccgccgggcccgccgggcgcgccgggcccgtgc

SEQ ID NO: 1011 - DNA, 3804 bp, Homo sapiens
ggcgaacgcggctttccgggcattccgggcaccccgggcccgccgggcctgccgggcctgcagggcccggtgggcccgccgggctttaccggcccgccgggcccgccgggcccgccgggcccgccgggcgaaaaaggccagatgggcctgagctttcagggcccgaaaggcgataaaggcgatcagggcgtgagcggcccgccgggcgtgccgggccaggcgcaggtgcaggaaaaaggcgattttgcgaccaaaggcgaaaaaggccagaaaggcgaaccgggctttcagggcatgccgggcgtgggcgaaaaaggcgaaccgggcaaaccgggcccgcgcggcaaaccgggcaaagatggcgataaaggcgaaaaaggcagcccgggctttccgggcgaaccgggctatccgggcctgattggccgccagggcccgcagggcgaaaaaggcgaagcgggcccgccgggcccgccgggcattgtgattggcaccggcccgctgggcgaaaaaggcgaacgcggctatccgggcaccccgggcccgcgcggcgaaccgggcccgaaaggctttccgggcctgccgggccagccgggcccgccgggcctgccggtgccgggccaggcgggcgcgccgggctttccgggcgaacgcggcgaaaaaggcgatcgcggctttccgggcaccagcctgccgggcccgagcggccgcgatggcctgccgggcccgccgggcagcccgggcccgccgggccagccgggctataccaacggcattgtggaatgccagccgggcccgccgggcgatcagggcccgccgggcattccgggccagccgggctttattggcgaaattggcgaaaaaggccagaaaggcgaaagctgcctgatttgcgatattgatggctatcgcggcccgccgggcccgcagggcccgccgggcgaaattggctttccgggccagccgggcgcgaaaggcgatcgcggcctgccgggccgcgatggcgtggcgggcgtgccgggcccgcagggcaccccgggcctgattggccagccgggcgcgaaaggcgaaccgggcgaattttattttgatctgcgcctgaaaggcgataaaggcgatccgggctttccgggccagccgggcatgaccggccgcgcgggcagcccgggccgcgatggccatccgggcctgccgggcccgaaaggcagcccgggcagcgtgggcctgaaaggcgaacgcggcccgccgggcggcgtgggctttccgggcagccgcggcgataccggcccgccgggcccgccgggctatggcccggcgggcccgattggcgataaaggccaggcgggctttccgggcggcccgggcagcccgggcctgccgggcccgaaaggcgaaccgggcaaaattgtgccgctgccgggcccgccgggcgcggaaggcctgccgggcagcccgggctttccgggcccgcagggcgatcgcggctttccgggcaccccgggccgcccgggcctgccgggcgaaaaaggcgcggtgggccagccgggcattggctttccgggcccgccgggcccgaaaggcgtggatggcctgccgggcgatatgggcccgccgggcaccccgggccgcccgggctttaacggcctgccgggcaacccgggcgtgcagggccagaaaggcgaaccgggcgtgggcctgccgggcctgaaaggcctgccgggcctgccgggcattccgggcaccccgggcgaaaaaggcagcattggcgtgccgggcgtgccgggcgaacatggcgcgattggcccgccgggcctgcagggcattcgcggcgaaccgggcccgccgggcctgccgggcagcgtgggcagcccgggcgtgccgggcattggcccgccgggcgcgcgcggcccgccgggcggccagggcccgccgggcctgagcggcccgccgggcattaaaggcgaaaaaggctttccgggctttccgggcctggatatgccgggcccgaaaggcgataaaggcgcgcagggcctgccgggcattaccggccagagcggcctgccgggcctgccgggccagcagggcgcgccgggcattccgggctttccgggcagcaaaggcgaaatgggcgtgatgggcaccccgggccagccgggcagcccgggcccggtgggcgcgccgggcctgccgggcgaaaaaggcgatcatggctttccgggcagcagcggcccgcgcggcgatccgggcctgaaaggcgataaaggcgatgtgggcctgccgggcaaaccgggcagcatggataaagtggatatgggcagcatgaaaggccagaaaggcgatcagggcgaaaaaggccagattggcccgattggcgaaaaaggcagccgcggcgatccgggcaccccgggcgtgccgggcaaagatggccaggcgggccagccgggccagccgggcccgaaaggcgatccgggcattagcggcaccccgggcgcgccgggcctgccgggcccgaaaggcagcgtgggcggcatgggcctgccgggcaccccgggcgaaaaaggcgtgccgggcattccgggcccgcagggcagcccgggcctgccgggcgataaaggcgcgaaaggcgaaaaaggccaggcgggcccgccgggcattggcattccgggcctgcgcggcgaaaaaggcgatcagggcattgcgggctttccgggcagcccgggcgaaaaaggcgaaaaaggcagcattggcattccgggcatgccgggcagcccgggcctgaaaggcagcccgggcagcgtgggctatccgggcagcccgggcctgccgggcgaaaaaggcgataaaggcctgccgggcctggatggcattccgggcgtgaaaggcgaagcgggcctgccgggcaccccgggcccgaccggcccggcgggccagaaaggcgaaccgggcagcgatggcattccgggcagcgcgggcgaaaaaggcgaaccgggcctgccgggccgcggctttccgggctttccgggcgcgaaaggcgataaaggcagcaaaggcgaagtgggctttccgggcctggcgggcagcccgggcattccgggcagcaaaggcgaacagggctttatgggcccgccgggcccgcagggccagccgggcctgccgggcagcccgggccatgcgaccgaaggcccgaaaggcgatcgcggcccgcagggccagccgggcctgccgggcctgccgggcccgatgggcccgccgggcctgccgggcattgatggcgtgaaaggcgataaaggcaacccgggctggccgggcgcgccgggcgtgccgggcccgaaaggcgatccgggctttcagggcatgccgggcattggcggcagcccgggcattaccggcagcaaaggcgatatgggcccgccgggcgtgccgggctttcagggcccgaaaggcctgccgggcctgcagggcattaaaggcgatcagggcgatcagggcgtgccgggcgcgaaaggcctgccgggcccgccgggcccgccgggcccgtatgatattattaaaggcgaaccgggcctgccgggcccggaaggcccgccgggcctgaaaggcctgcagggcctgccgggcccgaaaggccagcagggcgtgaccggcctggtgggcattccgggcccgccgggcattccgggctttgatggcgcgccgggccagaaaggcgaaatgggcccggcgggcccgaccggcccgcgcggctttccgggcccgccgggcccggatggcctgccgggcagcatgggcccgccgggcaccccg

SEQ ID NO: 1012 - DNA, 3903 bp, Homo sapiens
ggcgaaccgggcgaaccgggcctggtgggctttcagggcccgccgggccgcccgggccatgtgggccagatgggcccggtgggcgcgccgggccgcccgggcccgccgggcccgccgggcccgaaaggccagcagggcaaccgcggcctgggcttttatggcgtgaaaggcgaaaaaggcgatgtgggccagccgggcccgaacggcattccgagcgataccctgcatccgattattgcgccgaccggcgtgacctttcatccggatcagtataaaggcgaaaaaggcagcgaaggcgaaccgggcattcgcggcattagcctgaaaggcgaagaaggcattatgggctttccgggcctgcgcggctatccgggcctgagcggcgaaaaaggcagcccgggccagaaaggcagccgcggcctggatggctatcagggcccggatggcccgcgcggcccgaaaggcgaagcgggcgatccgggcccgccgggcctgccggcgtatagcccgcatccgagcctggcgaaaggcgcgcgcggcgatccgggctttccgggcgcgcagggcgaaccgggcagccagggcgaaccgggcgatccgggcctgccgggcccgccgggcctgagcattggcgatggcgatcagcgccgcggcctgccgggcgaaatgggcccgaaaggctttattggcgatccgggcattccggcgctgtatggcggcccgccgggcccggatggcaaacgcggcccgccgggcccgccgggcctgccgggcccgccgggcccggatggctttctgtttggcctgaaaggcgcgaaaggccgcgcgggctttccgggcctgccgggcagcccgggcgcgcgcggcccgaaaggctggaaaggcgatgcgggcgaatgccgctgcaccgaaggcgatgaagcgattaaaggcctgccgggcctgccgggcccgaaaggctttgcgggcattaacggcgaaccgggccgcaaaggcgatcgcggcgatccgggccagcatggcctgccgggctttccgggcctgaaaggcgtgccgggcaacattggcgcgccgggcccgaaaggcgcgaaaggcgatagccgcaccattaccaccaaaggcgaacgcggccagccgggcgtgccgggcgtgccgggcatgaaaggcgatgatggcagcccgggccgcgatggcctggatggctttccgggcctgccgggcccgccgggcgatggcattaaaggcccgccgggcgatccgggctatccgggcattccgggcaccaaaggcaccccgggcgaaatgggcccgccgggcctgggcctgccgggcctgaaaggccagcgcggctttccgggcgatgcgggcctgccgggcccgccgggctttctgggcccgccgggcccggcgggcaccccgggccagattgattgcgataccgatgtgaaacgcgcggtgggcggcgatcgccaggaagcgattcagccgggctgcattggcggcccgaaaggcctgccgggcctgccgggcccgccgggcccgaccggcgcgaaaggcctgcgcggcattccgggctttgcgggcgcggatggcggcccgggcccgcgcggcctgccgggcgatgcgggccgcgaaggctttccgggcccgccgggctttattggcccgcgcggcagcaaaggcgcggtgggcctgccgggcccggatggcagcccgggcccgattggcctgccgggcccggatggcccgccgggcgaacgcggcctgccgggcgaagtgctgggcgcgcagccgggcccgcgcggcgatgcgggcgtgccgggccagccgggcctgaaaggcctgccgggcgatcgcggcccgccgggctttcgcggcagccagggcatgccgggcatgccgggcctgaaaggccagccgggcctgccgggcccgagcggccagccgggcctgtatggcccgccgggcctgcatggctttccgggcgcgccgggccaggaaggcccgctgggcctgccgggcattccgggccgcgaaggcctgccgggcgatcgcggcgatccgggcgataccggcgcgccgggcccggtgggcatgaaaggcctgagcggcgatcgcggcgatgcgggctttaccggcgaacagggccatccgggcagcccgggctttaaaggcattgatggcatgccgggcaccccgggcctgaaaggcgatcgcggcagcccgggcatggatggctttcagggcatgccgggcctgaaaggccgcccgggctttccgggcagcaaaggcgaagcgggcttttttggcattccgggcctgaaaggcctggcgggcgaaccgggctttaaaggcagccgcggcgatccgggcccgccgggcccgccgccggtgattctgccgggcatgaaagatattaaaggcgaaaaaggcgatgaaggcccgatgggcctgaaaggctatctgggcgcgaaaggcattcagggcatgccgggcattccgggcctgagcggcattccgggcctgccgggccgcccgggccatattaaaggcgtgaaaggcgatattggcgtgccgggcattccgggcctgccgggctttccgggcgtggcgggcccgccgggcattaccggctttccgggctttattggcagccgcggcgataaaggcgcgccgggccgcgcgggcctgtatggcgaaattggcgcgaccggcgattttggcgatattggcgataccattaacctgccgggccgcccgggcctgaaaggcgaacgcggcaccaccggcattccgggcctgaaaggcttttttggcgaaaaaggcaccgaaggcgatattggctttccgggcattaccggcgtgaccggcgtgcagggcccgccgggcctgaaaggccagaccggctttccgggcctgaccggcccgccgggcagccagggcgaactgggccgcattggcctgccgggcggcaaaggcgatgatggctggccgggcgcgccgggcctgccgggctttccgggcctgcgcggcattcgcggcctgcatggcctgccgggcaccaaaggctttccgggcagcccgggcagcgatattcatggcgatccgggctttccgggcccgccgggcgaacgcggcgatccgggcgaagcgaacaccctgccgggcccggtgggcgtgccgggccagaaaggcgatcagggcgcgccgggcgaacgcggcccgccgggcagcccgggcctgcagggctttccgggcattaccccgccgagcaacattagcggcgcgccgggcgataaaggcgcgccgggcatttttggcctgaaaggctatcgcggcccgccgggcccgccgggcagcgcggcgctgccgggcagcaaaggcgataccggcaacccgggcgcgccgggcaccccgggcaccaaaggctgggcgggcgatagcggcccgcagggccgcccgggcgtgtttggcctgccgggcgaaaaaggcccgcgcggcgaacagggctttatgggcaacaccggcccgaccggcgcggtgggcgatcgcggcccgaaaggcccgaaaggcgatccgggctttccgggcgcgccgggcaccgtgggcgcgccgggcattgcgggcattccgcagaaaattgcggtgcagccgggcaccgtgggcccgcagggccgccgcggcccgccgggcgcgccgggcgaaatgggcccgcagggcccgccgggcgaaccgggctttcgcggcgcgccgggcaaagcgggcccgcagggccgcggcggcgtgagcgcggtgccgggctttcgcggcgatgaaggcccgattggccatcagggcccgattggccaggaaggcgcgccgggccgcccgggcagcccgggcctgccgggcatgccgggccgc

SEQ ID NO: 1013 - DNA, 4188 bp, Homo sapiens
ggcgcgaaaggcgaaaaaggcgaaaaaggctttccgggcccgccgggcagcccgggccagaaaggctttaccggcccggaaggcctgccgggcccgcagggcccgaaaggctttccgggcctgccgggcctgaccggcagcaaaggcgtgcgcggcattagcggcctgccgggctttagcggcagcccgggcctgccgggcaccccgggcaacaccggcccgtatggcctggtgggcgtgccgggctgcagcggcagcaaaggcgaacagggctttccgggcctgccgggcaccctgggctatccgggcattccgggcgcggcgggcctgaaaggccagaaaggcgcgccggcgaaagaagaagatattgaactggatgcgaaaggcgatccgggcctgccgggcgcgccgggcccgcagggcctgccgggcccgccgggctttccgggcccggtgggcccgccgggcccgccgggcttttttggctttccgggcgcgatgggcccgcgcggcccgaaaggccatatgggcgaacgcgtgattggccataaaggcgaacgcggcgtgaaaggcctgaccggcccgccgggcccgccgggcaccgtgattgtgaccctgaccggcccggataaccgcaccgatctgaaaggcgaaaaaggcgataaaggcgcgatgggcgaaccgggcccgccgggcccgagcggcctgccgggcgaaagctatggcagcgaaaaaggcgcgccgggcgatccgggcctgcagggcaaaccgggcaaagatggcgtgccgggctttccgggcagcgaaggcgtgaaaggcaaccgcggctttccgggcctgatgggcgaagatggcattaaaggccagaaaggcgatattggcccgccgggctttcgcggcccgaccgaatattatgatacctatcaggaaaaaggcgatgaaggcaccccgggcccgccgggcccgcgcggcgcgcgcggcccgcagggcccgagcggcccgccgggcgtgccgggcagcccgggcagcagccgcccgggcctgcgcggcgcgccgggctggccgggcctgaaaggcagcaaaggcgaacgcggccgcccgggcaaagatgcgatgggcaccccgggcagcccgggctgcgcgggcagcccgggcctgccgggcagcccgggcccgccgggcccgccgggcgatattgtgtttcgcaaaggcccgccgggcgatcatggcctgccgggctatctgggcagcccgggcattccgggcgtggatggcccgaaaggcgaaccgggcctgctgtgcacccagtgcccgtatattccgggcccgccgggcctgccgggcctgccgggcctgcatggcgtgaaaggcattccgggccgccagggcgcggcgggcctgaaaggcagcccgggcagcccgggcaacaccggcctgccgggctttccgggctttccgggcgcgcagggcgatccgggcctgaaaggcgaaaaaggcgaaaccctgcagccggaaggccaggtgggcgtgccgggcgatccgggcctgcgcggccagccgggccgcaaaggcctggatggcattccgggcaccccgggcgtgaaaggcctgccgggcccgaaaggcgaactggcgctgagcggcgaaaaaggcgatcagggcccgccgggcgatccgggcagcccgggcagcccgggcccggcgggcccggcgggcccgccgggctatggcccgcagggcgaaccgggcctgcagggcacccagggcgtgccgggcgcgccgggcccgccgggcgaagcgggcccgcgcggcgaactgagcgtgagcaccccggtgccgggcccgccgggcccgccgggcccgccgggccatccgggcccgcagggcccgccgggcattccgggcagcctgggcaaatgcggcgatccgggcctgccgggcccggatggcgaaccgggcattccgggcattggctttccgggcccgccgggcccgaaaggcgatcagggctttccgggcaccaaaggcagcctgggctgcccgggcaaaatgggcgaaccgggcctgccgggcaaaccgggcctgccgggcgcgaaaggcgaaccggcggtggcgatgccgggcggcccgggcaccccgggctttccgggcgaacgcggcaacagcggcgaacatggcgaaattggcctgccgggcctgccgggcctgccgggcaccccgggcaacgaaggcctggatggcccgcgcggcgatccgggccagccgggcccgccgggcgaacagggcccgccgggccgctgcattgaaggcccgcgcggcgcgcagggcctgccgggcctgaacggcctgaaaggccagcagggccgccgcggcaaaaccggcccgaaaggcgatccgggcattccgggcctggatcgcagcggctttccgggcgaaaccggcagcccgggcattccgggccatcagggcgaaatgggcccgctgggccagcgcggctatccgggcaacccgggcattctgggcccgccgggcgaagatggcgtgattggcatgatgggctttccgggcgcgattggcccgccgggcccgccgggcaacccgggcaccccgggccagcgcggcagcccgggcattccgggcgtgaaaggccagcgcggcaccccgggcgcgaaaggcgaacagggcgataaaggcaacccgggcccgagcgaaattagccatgtgattggcgataaaggcgaaccgggcctgaaaggctttgcgggcaacccgggcgaaaaaggcaaccgcggcgtgccgggcatgccgggcctgaaaggcctgaaaggcctgccgggcccggcgggcccgccgggcccgcgcggcgatctgggcagcaccggcaacccgggcgaaccgggcctgcgcggcattccgggcagcatgggcaacatgggcatgccgggcagcaaaggcaaacgcggcaccctgggctttccgggccgcgcgggccgcccgggcctgccgggcattcatggcctgcagggcgataaaggcgaaccgggctatagcgaaggcacccgcccgggcccgccgggcccgaccggcgatccgggcctgccgggcgatatgggcaaaaaaggcgaaatgggccagccgggcccgccgggccatctgggcccggcgggcccggaaggcgcgccgggcagcccgggcagcccgggcctgccgggcaaaccgggcccgcatggcgatctgggctttaaaggcattaaaggcctgctgggcccgccgggcattcgcggcccgccgggcctgccgggctttccgggcagcccgggcccgatgggcattcgcggcgatcagggccgcgatggcattccgggcccggcgggcgaaaaaggcgaaaccggcctgctgcgcgcgccgccgggcccgcgcggcaacccgggcgcgcagggcgcgaaaggcgatcgcggcgcgccgggctttccgggcctgccgggccgcaaaggcgcgatgggcgatgcgggcccgcgcggcccgaccggcattgaaggctttccgggcccgccgggcctgccgggcgcgattattccgggccagaccggcaaccgcggcccgccgggcagccgcggcagcccgggcgcgccgggcccgccgggcccgccgggcagccatgtgattggcattaaaggcgataaaggcagcatgggccatccgggcccgaaaggcccgccgggcaccgcgggcgatatgggcccgccgggccgcctgggcgcgccgggcaccccgggcctgccgggcccgcgcggcgatccgggctttcagggctttccgggcgtgaaaggcgaaaaaggcaacccgggctttctgggcagcattggcccgccgggcccgattggcccgaaaggcccgccgggcgtgcgcggcgatccgggcaccctgaaaattattagcctgccgggcagcccgggcccgccgggcaccccgggcgaaccgggcatgcagggcgaaccgggcccgccgggcccgccgggcaacctgggcccgtgcggcccgcgcggcaaaccgggcaaagatggcaaaccgggcaccccgggcccggcgggcgaaaaaggcaacaaaggcagcaaaggcgaaccgggcccggcgggcagcgatggcctgccgggcctgaaaggcaaacgcggcgatagcggcagcccg

SEQ ID NO: 1014 - DNA, 4185 bp, Homo sapiens
ggcccgccgggcccgccgggcccgcagggcccgattggcccgctgggcgcgccgggcccgattggcctgagcggcgaaaaaggcatgcgcggcgatcgcggcccgccgggcgcggcgggcgataaaggcgataaaggcccgaccggcgtgccgggctttccgggcctggatggcattccgggccatccgggcccgccgggcccgcgcggcaaaccgggcatgagcggccataacggcagccgcggcgatccgggctttccgggcggccgcggcgcgctgggcccgggcggcccgctgggccatccgggcgaaaaaggcgaaaaaggcaacagcgtgtttattctgggcgcggtgaaaggcattcagggcgatcgcggcgatccgggcctgccgggcctgccgggcagctggggcgcgggcggcccggcgggcccgaccggctatccgggcgaaccgggcctggtgggcccgccgggccagccgggccgcccgggcctgaaaggcaacccgggcgtgggcgtgaaaggccagatgggcgatccgggcgaagtgggccagcagggcagcccgggcccgaccctgctggtggaaccgccggatttttgcctgtataaaggcgaaaaaggcattaaaggcattccgggcatggtgggcctgccgggcccgccgggccgcaaaggcgaaagcggcattggcgcgaaaggcgaaaaaggcattccgggctttccgggcccgcgcggcgatccgggcagctatggcagcccgggctttccgggcctgaaaggcgaactgggcctggtgggcgatccgggcctgtttggcctgattggcccgaaaggcgatccgggcaaccgcggccatccgggcccgccgggcgtgctggtgaccccgccgctgccgctgaaaggcccgccgggcgatccgggctttccgggccgctatggcgaaaccggcgatgtgggcccgccgggcccgccgggcctgctgggccgcccgggcgaagcgtgcgcgggcatgattggcccgccgggcccgcagggctttccgggcctgccgggcctgccgggcgaagcgggcattccgggccgcccggatagcgcgccgggcaaaccgggcaaaccgggcagcccgggcctgccgggcgcgccgggcctgcagggcctgccgggcagcagcgtgatttattgcagcgtgggcaacccgggcccgcagggcattaaaggcaaagtgggcccgccgggcggccgcggcccgaaaggcgaaaaaggcaacgaaggcctgtgcgcgtgcgaaccgggcccgatgggcccgccgggcccgccgggcctgccgggccgccagggcagcaaaggcgatctgggcctgccgggctggctgggcaccaaaggcgatccgggcccgccgggcgcggaaggcccgccgggcctgccgggcaaacatggcgcgagcggcccgccgggcaacaaaggcgcgaaaggcgatatggtggtgagccgcgtgaaaggccataaaggcgaacgcggcccggatggcccgccgggctttccgggccagccgggcagccatggccgcgatggccatgcgggcgaaaaaggcgatccgggcccgccgggcgatcatgaagatgcgaccccgggcggcaaaggctttccgggcccgctgggcccgccgggcaaagcgggcccggtgggcccgccgggcctgggctttccgggcccgccgggcgaacgcggccatccgggcgtgccgggccatccgggcgtgcgcggcccggatggcctgaaaggccagaaaggcgataccattagctgcaacgtgacctatccgggccgccatggcccgccgggctttgatggcccgccgggcccgaaaggctttccgggcccgcagggcgcgccgggcctgagcggcagcgatggccataaaggccgcccgggcaccccgggcaccgcggaaattccgggcccgccgggctttcgcggcgatatgggcgatccgggctttggcggcgaaaaaggcagcagcccggtgggcccgccgggcccgccgggcagcccgggcgtgaacggccagaaaggcattccgggcgatccggcgtttggccatctgggcccgccgggcaaacgcggcctgagcggcgtgccgggcattaaaggcccgcgcggcgatccgggctgcccgggcgcggaaggcccggcgggcattccgggctttctgggcctgaaaggcccgaaaggccgcgaaggccatgcgggctttccgggcgtgccgggcccgccgggccatagctgcgaacgcggcgcgccgggcattccgggccagccgggcctgccgggctatccgggcagcccgggcgcgccgggcggcaaaggccagccgggcgatgtgggcccgccgggcccggcgggcatgaaaggcctgccgggcctgccgggccgcccgggcgcgcatggcccgccgggcctgccgggcattccgggcccgtttggcgatgatggcctgccgggcccgccgggcccgaaaggcccgcgcggcctgccgggctttccgggctttccgggcgaacgcggcaaaccgggcgcggaaggctgcccgggcgcgaaaggcgaaccgggcgaaaaaggcatgagcggcctgccgggcgatcgcggcctgcgcggcgcgaaaggcgcgattggcccgccgggcgatgaaggcgaaatggcgattattagccagaaaggcaccccgggcgaaccgggcccgccgggcgatgatggctttccgggcgaacgcggcgataaaggcaccccgggcatgcagggccgccgcggcgaaccgggccgctatggcccgccgggctttcatcgcggcgaaccgggcgaaaaaggccagccgggcccgccgggcccgccgggcccgccgggcagcaccggcctgcgcggctttattggctttccgggcctgccgggcgatcagggcgaaccgggcagcccgggcccgccgggctttagcggcattgatggcgcgcgcggcccgaaaggcaacaaaggcgatccggcgagccattttggcccgccgggcccgaaaggcgaaccgggcagcccgggctgcccgggccattttggcgcgagcggcgaacagggcctgccgggcattcagggcccgcgcggcagcccgggccgcccgggcccgccgggcagcagcggcccgccgggctgcccgggcgatcatggcatgccgggcctgcgcggccagccgggcgaaatgggcgatccgggcccgcgcggcctgcagggcgatccgggcattccgggcccgccgggcattaaaggcccgagcggcagcccgggcctgaacggcctgcatggcctgaaaggccagaaaggcaccaaaggcgcgagcggcctgcatgatgtgggcccgccgggcccggtgggcattccgggcctgaaaggcgaacgcggcgatccgggcagcccgggcattagcccgccgggcccgcgcggcaaaaaaggcccgccgggcccgccgggcagcagcggcccgccgggcccggcgggcgcgaccggccgcgcgccgaaagatattccggatccgggcccgccgggcgatcagggcccgccgggcccggatggcccgcgcggcgcgccgggcccgccgggcctgccgggcagcgtggatctgctgcgcggcgaaccgggcgattgcggcctgccgggcccgccgggcccgccgggcccgccgggcccgccgggctataaaggctttccgggctgcgatggcaaagatggccagaaaggcccggtgggctttccgggcccgcagggcccgcatggctttccgggcccgccgggcgaaaaaggcctgccgggcccgccgggccgcaaaggcccgaccggcctgccgggcccgcgcggcgaaccgggcccgccggcggatgtggatgattgcccgcgcattccgggcctgccgggcgcgccgggcatgcgcggcccggaaggcgcgatgggcctgccgggcatgcgcggcccgagcggcccgggctgcaaaggcgaaccgggcctggatggccgccgcggcgtggatggcgtgccgggcagcccgggcccgccgggccgcaaaggcgataccggcgaagatggctatccgggcggcccgggcccgccgggcccgattggcgatccgggcccgaaaggctttggc

SEQ ID NO: 1015 - DNA, 4245 bp, Homo sapiens
ggcattaaaggcgaaaaaggcgaacgcggctttccgggcctggaaggccatccgggcctgccgggctttccgggcccggaaggcccgccgggcccgcgcggccagaaaggcgatgatggcattccgggcccgccgggcccgaaaggcattcgcggcccgccgggcctgccgggctttccgggcaccccgggcctgccgggcatgccgggccatgatggcgcgccgggcccgcagggcattccgggctgcaacggcaccaaaggcgaacgcggctttccgggcagcccgggctttccgggcctgcagggcccgccgggcccgccgggcattccgggcatgaaaggcgaaccgggcagcattattatgagcagcctgccgggcccgaaaggcaacccgggctatccgggcccgccgggcattcagggcctgccgggcccgaccggcattccgggcccgattggcccgccgggcccgccgggcctgatgggcccgccgggcccgccgggcctgccgggcccgaaaggcaacatgggcctgaactttcagggcccgaaaggcgaaaaaggcgaacagggcctgcagggcccgccgggcccgccgggccagattagcgaacagaaacgcccgattgatgtggaatttcagaaaggcgatcagggcctgccgggcgatcgcggcccgccgggcccgccgggcattcgcggcccgccgggcccgccgggcggcgaaaaaggcgaaaaaggcgaacagggcgaaccgggcaaacgcggcaaaccgggcaaagatggcgaaaacggccagccgggcattccgggcctgccgggcgatccgggctatccgggcgaaccgggccgcgatggcgaaaaaggccagaaaggcgataccggcccgccgggcccgccgggcctggtgattccgcgcccgggcaccggcattaccattggcgaaaaaggcaacattggcctgccgggcctgccgggcgaaaaaggcgaacgcggctttccgggcattcagggcccgccgggcctgccgggcccgccgggcgcggcggtgatgggcccgccgggcccgccgggctttccgggcgaacgcggccagaaaggcgatgaaggcccgccgggcattagcattccgggcccgccgggcctggatggccagccgggcgcgccgggcctgccgggcccgccgggcccggcgggcccgcatattccgccgagcgatgaaatttgcgaaccgggcccgccgggcccgccgggcagcccgggcgataaaggcctgcagggcgaacagggcgtgaaaggcgataaaggcgatacctgctttaactgcattggcaccggcattagcggcccgccgggccagccgggcctgccgggcctgccgggcccgccgggcagcctgggctttccgggccagaaaggcgaaaaaggccaggcgggcgcgaccggcccgaaaggcctgccgggcattccgggcgcgccgggcgcgccgggctttccgggcagcaaaggcgaaccgggcgatattctgacctttccgggcatgaaaggcgataaaggcgaactgggcagcccgggcgcgccgggcctgccgggcctgccgggcaccccgggccaggatggcctgccgggcctgccgggcccgaaaggcgaaccgggcggcattacctttaaaggcgaacgcggcccgccgggcaacccgggcctgccgggcctgccgggcaacattggcccgatgggcccgccgggctttggcccgccgggcccggtgggcgaaaaaggcattcagggcgtggcgggcaacccgggccagccgggcattccgggcccgaaaggcgatccgggccagaccattacccagccgggcaaaccgggcctgccgggcaacccgggccgcgatggcgatgtgggcctgccgggcgatccgggcctgccgggccagccgggcctgccgggcattccgggcagcaaaggcgaaccgggcattccgggcattggcctgccgggcccgccgggcccgaaaggctttccgggcattccgggcccgccgggcgcgccgggcaccccgggccgcattggcctggaaggcccgccgggcccgccgggctttccgggcccgaaaggcgaaccgggctttgcgctgccgggcccgccgggcccgccgggcctgccgggctttaaaggcgcgctgggcccgaaaggcgatcgcggctttccgggcccgccgggcccgccgggccgcaccggcctggatggcctgccgggcccgaaaggcgatgtgggcccgaacggccagccgggcccgatgggcccgccgggcctgccgggcattggcgtgcagggcccgccgggcccgccgggcattccgggcccgattggccagccgggcctgcatggcattccgggcgaaaaaggcgatccgggcccgccgggcctggatgtgccgggcccgccgggcgaacgcggcagcccgggcattccgggcgcgccgggcccgattggcccgccgggcagcccgggcctgccgggcaaagcgggcgcgagcggctttccgggcaccaaaggcgaaatgggcatgatgggcccgccgggcccgccgggcccgctgggcattccgggccgcagcggcgtgccgggcctgaaaggcgatgatggcctgcagggccagccgggcctgccgggcccgaccggcgaaaaaggcagcaaaggcgaaccgggcctgccgggcccgccgggcccgatggatccgaacctgctgggcagcaaaggcgaaaaaggcgaaccgggcctgccgggcattccgggcgtgagcggcccgaaaggctatcagggcctgccgggcgatccgggccagccgggcctgagcggccagccgggcctgccgggcccgccgggcccgaaaggcaacccgggcctgccgggccagccgggcctgattggcccgccgggcctgaaaggcaccattggcgatatgggctttccgggcccgcagggcgtggaaggcccgccgggcccgagcggcgtgccgggccagccgggcagcccgggcctgccgggccagaaaggcgataaaggcgatccgggcattagcagcattggcctgccgggcctgccgggcccgaaaggcgaaccgggcctgccgggctatccgggcaacccgggcattaaaggcagcgtgggcgatccgggcctgccgggcctgccgggcaccccgggcgcgaaaggccagccgggcctgccgggctttccgggcaccccgggcccgccgggcccgaaaggcattagcggcccgccgggcaacccgggcctgccgggcgaaccgggcccggtgggcggcggcggccatccgggccagccgggcccgccgggcgaaaaaggcaaaccgggccaggatggcattccgggcccggcgggccagaaaggcgaaccgggccagccgggctttggcaacccgggcccgccgggcctgccgggcctgagcggccagaaaggcgatggcggcctgccgggcattccgggcaacccgggcctgccgggcccgaaaggcgaaccgggctttcatggctttccgggcgtgcagggcccgccgggcccgccgggcagcccgggcccggcgctggaaggcccgaaaggcaacccgggcccgcagggcccgccgggccgcccgggcctgccgggcccggaaggcccgccgggcctgccgggcaacggcggcattaaaggcgaaaaaggcaacccgggccagccgggcctgccgggcctgccgggcctgaaaggcgatcagggcccgccgggcctgcagggcaacccgggccgcccgggcctgaacggcatgaaaggcgatccgggcctgccgggcgtgccgggctttccgggcatgaaaggcccgagcggcgtgccgggcagcgcgggcccggaaggcgaaccgggcctgattggcccgccgggcccgccgggcctgccgggcccgagcggccagagcattattattaaaggcgatgcgggcccgccgggcattccgggccagccgggcctgaaaggcctgccgggcccgcagggcccgcagggcctgccgggcccgaccggcccgccgggcgatccgggccgcaacggcctgccgggctttgatggcgcgggcggccgcaaaggcgatccgggcctgccgggccagccgggcacccgcggcctggatggcccgccgggcccggatggcctgcagggcccgccgggcccgccgggcaccagc

SEQ ID NO: 1016 - DNA, 4251 bp, Homo sapiens
ggcgcgcgcggccgcccgggcccgattggcattcagggcccgaccggcccgcagggctttaccggcagcaccggcctgagcggcctgaaaggcgaacgcggctttccgggcctgctgggcccgtatggcccgaaaggcgataaaggcccgatgggcgtgccgggctttctgggcattaacggcattccgggccatccgggccagccgggcccgcgcggcccgccgggcctggatggctgcaacggcacccagggcgcggtgggctttccgggcccggatggctatccgggcctgctgggcccgccgggcctgccgggccagaaaggcagcaaaggcgatccggtgctggcgccgggcagctttaaaggcatgaaaggcgatccgggcctgccgggcctggatggcattaccggcccgcagggcgcgccgggctttccgggcgcggtgggcccggcgggcccgccgggcctgcagggcccgccgggcccgccgggcccgctgggcccggatggcaacatgggcctgggctttcagggcgaaaaaggcgtgaaaggcgatgtgggcctgccgggcccggcgggcccgccgccgagcaccggcgaactggaatttatgggctttccgaaaggcaaaaaaggcagcaaaggcgaaccgggcccgaaaggctttccgggcattagcggcccgccgggctttccgggcctgggcaccaccggcgaaaaaggcgaaaaaggcgaaaaaggcattccgggcctgccgggcccgcgcggcccgatgggcagcgaaggcgtgcagggcccgccgggccagcagggcaaaaaaggcaccctgggctttccgggcctgaacggctttcagggcattgaaggccagaaaggcgatattggcctgccgggcccggatgtgtttattgatattgatggcgcggtgattagcggcaacccgggcgatccgggcgtgccgggcctgccgggcctgaaaggcgatgaaggcattcagggcctgcgcggcccgagcggcgtgccgggcctgccggcgctgagcggcgtgccgggcgcgctgggcccgcagggctttccgggcctgaaaggcgatcagggcaacccgggccgcaccaccattggcgcggcgggcctgccgggccgcgatggcctgccgggcccgccgggcccgccgggcccgccgagcccggaatttgaaaccgaaaccctgcataacaaagaaagcggctttccgggcctgcgcggcgaacagggcccgaaaggcaacctgggcctgaaaggcattaaaggcgatagcggcttttgcgcgtgcgatggcggcgtgccgaacaccggcccgccgggcgaaccgggcccgccgggcccgtggggcctgattggcctgccgggcctgaaaggcgcgcgcggcgatcgcggcagcggcggcgcgcagggcccggcgggcgcgccgggcctggtgggcccgctgggcccgagcggcccgaaaggcaaaaaaggcgaaccgattctgagcaccattcagggcatgccgggcgatcgcggcgatagcggcagccagggctttcgcggcgtgattggcgaaccgggcaaagatggcgtgccgggcctgccgggcctgccgggcctgccgggcgatggcggccagggctttccgggcgaaaaaggcctgccgggcctgccgggcgaaaaaggccatccgggcccgccgggcctgccgggcaacggcctgccgggcctgccgggcccgcgcggcctgccgggcgataaaggcaaagatggcctgccgggccagcagggcctgccgggcagcaaaggcattaccctgccgtgcattattccgggcagctatggcccgagcggctttccgggcaccccgggctttccgggcccgaaaggcagccgcggcctgccgggcaccccgggccagccgggcagcagcggcagcaaaggcgaaccgggcagcccgggcctggtgcatctgccggaactgccgggctttccgggcccgcgcggcgaaaaaggcctgccgggctttccgggcctgccgggcaaagatggcctgccgggcatgattggcagcccgggcctgccgggcagcaaaggcgcgaccggcgatatttttggcgcggaaaacggcgcgccgggcgaacagggcctgcagggcctgaccggccataaaggctttctgggcgatagcggcctgccgggcctgaaaggcgtgcatggcaaaccgggcctgctgggcccgaaaggcgaacgcggcagcccgggcaccccgggccaggtgggccagccgggcaccccgggcagcagcggcccgtatggcattaaaggcaaaagcggcctgccgggcgcgccgggctttccgggcattagcggccatccgggcaaaaaaggcacccgcggcaaaaaaggcccgccgggcagcattgtgaaaaaaggcctgccgggcctgaaaggcctgccgggcaacccgggcctggtgggcctgaaaggcagcccgggcagcccgggcgtggcgggcctgccggcgctgagcggcccgaaaggcgaaaaaggcagcgtgggctttgtgggctttccgggcattccgggcctgccgggcattccgggcacccgcggcctgaaaggcattccgggcagcaccggcaaaatgggcccgagcggccgcgcgggcaccccgggcgaaaaaggcgatcgcggcaacccgggcccggtgggcattccgagcccgcgccgcccgatgagcaacctgtggctgaaaggcgataaaggcagccagggcagcgcgggcagcaacggctttccgggcccgcgcggcgataaaggcgaagcgggccgcccgggcccgccgggcctgccgggcgcgccgggcctgccgggcattattaaaggcgtgagcggcaaaccgggcccgccgggctttatgggcattcgcggcctgccgggcctgaaaggcagcagcggcattaccggctttccgggcatgccgggcgaaagcggcagccagggcattcgcggcagcccgggcctgccgggcgcgagcggcctgccgggcctgaaaggcgataacggccagaccgtggaaattagcggcagcccgggcccgaaaggccagccgggcgaaagcggctttaaaggcaccaaaggccgcgatggcctgattggcaacattggctttccgggcaacaaaggcgaagatggcaaagtgggcgtgagcggcgatgtgggcctgccgggcgcgccgggctttccgggcgtggcgggcatgcgcggcgaaccgggcctgccgggcagcagcggccatcagggcgcgattggcccgctgggcagcccgggcctgattggcccgaaaggctttccgggctttccgggcctgcatggcctgaacggcctgccgggcaccaaaggcacccatggcaccccgggcccgagcattaccggcgtgccgggcccggcgggcctgccgggcccgaaaggcgaaaaaggctatccgggcattggcattggcgcgccgggcaaaccgggcctgcgcggccagaaaggcgatcgcggctttccgggcctgcagggcccggcgggcctgccgggcgcgccgggcattagcctgccgagcctgattgcgggccagccgggcgatccgggccgcccgggcctggatggcgaacgcggccgcccgggcccggcgggcccgccgggcccgccgggcccgagcagcaaccagggcgataccggcgatccgggctttccgggcattccgggcccgaaaggcccgaaaggcgatcagggcattccgggctttagcggcctgccgggcgaactgggcctgaaaggcatgcgcggcgaaccgggctttatgggcaccccgggcaaagtgggcccgccgggcgatccgggctttccgggcatgaaaggcaaagcgggcccgcgcggcagcagcggcctgcagggcgatccgggccagaccccgaccgcggaagcggtgcaggtgccgccgggcccgctgggcctgccgggcattgatggcattccgggcctgaccggcgatccgggcgcgcagggcccggtgggcctgcagggcagcaaaggcctgccgggcattccgggcaaagatggcccgagcggcctgccgggcccgccgggcgcgctgggcgatccgggcctgccgggcctgcagggcccgccgggctttgaaggcgcgccgggccagcagggcccgtttggcatgccgggcatgccgggccagagc

SEQ ID NO: 1017 - DNA, 3042 bp, Homo sapiens
ggcccggcgggcccgatgggcctgaccggccgcccgggcccggtgggcccgccgggcagcggcggcctgaaaggcgaaccgggcgatgtgggcccgcagggcccgcgcggcgtgcagggcccgccgggcccggcgggcaaaccgggccgccgcggccgcgcgggcagcgatggcgcgcgcggcatgccgggccagaccggcccgaaaggcgatcgcggctttgatggcctggcgggcctgccgggcgaaaaaggccatcgcggcgatccgggcccgagcggcccgccgggcccgccgggcgatgatggcgaacgcggcgatgatggcgaagtgggcccgcgcggcctgccgggcgaaccgggcccgcgcggcctgctgggcccgaaaggcccgccgggcccgccgggcccgccgggcgtgaccggcatggatggccagccgggcccgaaaggcaacgtgggcccgcagggcgaaccgggcccgccgggccagcagggcaacccgggcgcgcagggcctgccgggcccgcagggcgcgattggcccgccgggcgaaaaaggcccgctgggcaaaccgggcctgccgggcatgccgggcgcggatggcccgccgggccatccgggcaaagaaggcccgccgggcgaaaaaggcggccagggcccgccgggcccgcagggcccgattggctatccgggcccgcgcggcgtgaaaggcgcggatggcattcgcggcctgaaaggcaccaaaggcgaaaaaggcgaagatggctttccgggctttaaaggcgatatgggcattaaaggcgatcgcggcgaaattggcccgccgggcccgcgcggcgaagatggcccggaaggcccgaaaggccgcggcggcccgaacggcgatccgggcccgctgggcccgccgggcgaaaaaggcaaactgggcgtgccgggcctgccgggctatccgggccgccagggcccgaaaggcagcattggctttccgggctttccgggcgcgaacggcgaaaaaggcggccgcggcaccccgggcaaaccgggcccgcgcggccagcgcggcccgaccggcccgcgcggcgaacgcggcccgcgcggcattaccggcaaaccgggcccgaaaggcaacagcggcggcgatggcccggcgggcccgccgggcgaacgcggcccgaacggcccgcagggcccgaccggctttccgggcccgaaaggcccgccgggcccgccgggcaaagatggcctgccgggccatccgggccagcgcggcgaaaccggctttcagggcaaaaccggcccgccgggcccgccgggcgtggtgggcccgcagggcccgaccggcgaaaccggcccgatgggcgaacgcggccatccgggcccgccgggcccgccgggcgaacagggcctgccgggcctggcgggcaaagaaggcaccaaaggcgatccgggcccggcgggcctgccgggcaaagatggcccgccgggcctgcgcggctttccgggcgatcgcggcctgccgggcccggtgggcgcgctgggcctgaaaggcaacgaaggcccgccgggcccgccgggcccggcgggcagcccgggcgaacgcggcccggcgggcgcggcgggcccgattggcattccgggccgcccgggcccgcagggcccgccgggcccggcgggcgaaaaaggcgcgccgggcgaaaaaggcccgcagggcccggcgggccgcgatggcctgcagggcccggtgggcctgccgggcccggcgggcccggtgggcccgccgggcgaagatggcgataaaggcgaaattggcgaaccgggccagaaaggcagcaaaggcgataaaggcgaacagggcccgccgggcccgaccggcccgcagggcccgattggccagccgggcccgagcggcgcggatggcgaaccgggcccgcgcggccagcagggcctgtttggccagaaaggcgatgaaggcccgcgcggctttccgggcccgccgggcccggtgggcctgcagggcctgccgggcccgccgggcgaaaaaggcgaaaccggcgatgtgggccagatgggcccgccgggcccgccgggcccgcgcggcccgagcggcgcgccgggcgcggatggcccgcagggcccgccgggcggcattggcaacccgggcgcggtgggcgaaaaaggcgaaccgggcgaagcgggcgaaccgggcctgccgggcgaaggcggcccgccgggcccgaaaggcgaacgcggcgaaaaaggcgaaagcggcccgagcggcgcggcgggcccgccgggcccgaaaggcccgccgggcgatgatggcccgaaaggcagcccgggcccggtgggctttccgggcgatccgggcccgccgggcgaaccgggcccggcgggccaggatggcccgccgggcgataaaggcgatgatggcgaaccgggccagaccggcagcccgggcccgaccggcgaaccgggcccgagcggcccgccgggcaaacgcggcccgccgggcccggcgggcccggaaggccgccagggcgaaaaaggcgcgaaaggcgaagcgggcctggaaggcccgccgggcaaaaccggcccgattggcccgcagggcgcgccgggcaaaccgggcccggatggcctgcgcggcattccgggcccggtgggcgaacagggcctgccgggcagcccgggcccggatggcccgccgggcccgatgggcccgccgggcctgccgggcctgaaaggcgatagcggcccgaaaggcgaaaaaggccatccgggcctgattggcctgattggcccgccgggcgaacagggcgaaaaaggcgatcgcggcctgccgggcccgcagggcagcagcggcccgaaaggcgaacagggcattaccggcccgagcggcccgattggcccgccgggcccgccgggcctgccgggcccgccgggcccgaaaggcgcgaaaggcagcagcggcccgaccggcccgaaaggcgaagcgggccatccgggcccgccgggcccgccgggcccgccgggcgaagtg

SEQ ID NO: 1018 - DNA, 3051 bp, Homo sapiens
ggcagcgtgggcccggtgggcccgcgcggcccgcagggcctgcagggccagcagggcggcgcgggcccgaccggcccgccgggcgaaccgggcgatccgggcccgatgggcccgattggcagccgcggcccggaaggcccgccgggcaaaccgggcgaagatggcgaaccgggccgcaacggcaacccgggcgaagtgggctttgcgggcagcccgggcgcgcgcggctttccgggcgcgccgggcctgccgggcctgaaaggccatcgcggccataaaggcctggaaggcccgaaaggcgaagtgggcgcgccgggcagcaaaggcgaagcgggcccgaccggcccgatgggcgcgatgggcccgctgggcccgcgcggcatgccgggcgaacgcggccgcctgggcccgcagggcgcgccgggccagcgcggcgcgcatggcatgccgggcaaaccgggcccgatgggcccgctgggcattccgggcagcagcggctttccgggcaacccgggcatgaaaggcgaagcgggcccgaccggcgcgcgcggcccggaaggcccgcagggccagcgcggcgaaaccggcccgccgggcccggtgggcagcccgggcctgccgggcgcgattggcaccgatggcaccccgggcgcgaaaggcccgaccggcagcccgggcaccagcggcccgccgggcagcgcgggcccgccgggcagcccgggcccgcagggcagcaccggcccgcagggcattcgcggccagccgggcgatccgggcgtgccgggctttaaaggcgaagcgggcccgaaaggcgaaccgggcccgcatggcattcagggcccgattggcccgccgggcgaagaaggcaaacgcggcccgcgcggcgatccgggcaccgtgggcccgccgggcccggtgggcgaacgcggcgcgccgggcaaccgcggctttccgggcagcgatggcctgccgggcccgaaaggcgcgcagggcgaacgcggcccggtgggcagcagcggcccgaaaggcagccagggcgatccgggccgcccgggcgaaccgggcctgccgggcgcgcgcggcctgaccggcaacccgggcgtgcagggcccggaaggcaaactgggcccgctgggcgcgccgggcgaagatggccgcccgggcccgccgggcagcattggcattcgcggccagccgggcagcatgggcctgccgggcccgaaaggcagcagcggcgatccgggcaaaccgggcgaagcgggcaacgcgggcgtgccgggccagcgcggcgcgccgggcaaagatggcgaagtgggcccgagcggcccggtgggcccgccgggcctggcgggcgaacgcggcgaacagggcccgccgggcccgaccggctttcagggcctgccgggcccgccgggcccgccgggcgaaggcggcaaaccgggcgatcagggcgtgccgggcgatccgggcgcggtgggcccgctgggcccgcgcggcgaacgcggcaacccgggcgaacgcggcgaaccgggcattaccggcctgccgggcgaaaaaggcatggcgggcggccatggcccggatggcccgaaaggcagcccgggcccgagcggcaccccgggcgataccggcccgccgggcctgcagggcatgccgggcgaacgcggcattgcgggcaccccgggcccgaaaggcgatcgcggcggcattggcgaaaaaggcgcggaaggcaccgcgggcaacgatggcgcgcgcggcctgccgggcccgctgggcccgccgggcccggcgggcccgaccggcgaaaaaggcgaaccgggcccgcgcggcctggtgggcccgccgggcagccgcggcaacccgggcagccgcggcgaaaacggcccgaccggcgcggtgggctttgcgggcccgcagggcccggatggccagccgggcgtgaaaggcgaaccgggcgaaccgggccagaaaggcgatgcgggcagcccgggcccgcagggcctggcgggcagcccgggcccgcatggcccgaacggcgtgccgggcctgaaaggcggccgcggcacccagggcccgccgggcgcgaccggctttccgggcagcgcgggccgcgtgggcccgccgggcccggcgggcgcgccgggcccggcgggcccgctgggcgaaccgggcaaagaaggcccgccgggcctgcgcggcgatccgggcagccatggccgcgtgggcgatcgcggcccggcgggcccgccgggcggcccgggcgataaaggcgatccgggcgaagatggccagccgggcccggatggcccgccgggcccggcgggcaccaccggccagcgcggcattgtgggcatgccgggccagcgcggcgaacgcggcatgccgggcctgccgggcccggcgggcaccccgggcaaagtgggcccgaccggcgcgaccggcgataaaggcccgccgggcccggtgggcccgccgggcagcaacggcccggtgggcgaaccgggcccggaaggcccggcgggcaacgatggcaccccgggccgcgatggcgcggtgggcgaacgcggcgatcgcggcgatccgggcccggcgggcctgccgggcagccagggcgcgccgggcaccccgggcccggtgggcgcgccgggcgatgcgggccagcgcggcgatccgggcagccgcggcccgattggcccgccgggccgcgcgggcaaacgcggcctgccgggcccgcagggcccgcgcggcgataaaggcgatcatggcgatcgcggcgatcgcggccagaaaggccatcgcggctttaccggcctgcagggcctgccgggcccgccgggcccgaacggcgaacagggcagcgcgggcattccgggcccgtttggcccgcgcggcccgccgggcccggtgggcccgagcggcaaagaaggcaacccgggcccgctgggcccgattggcccgccgggcgtgcgcggcagcgtgggcgaagcgggcccggaaggcccgccgggcgaaccgggcccgccgggcccgccgggcccgccgggccatctg

SEQ ID NO: 1019 - DNA, 3033 bp, Homo sapiens
ggcccgccgggcccggtgggcctgaccggccgcccgggcccggtgggcctgccgggccatccgggcctgaaaggcgaagaaggcgcggaaggcccgcagggcccgcgcggcctgcagggcccgcatggcccgccgggccgcgtgggcaaaatgggccgcccgggcgcggatggcgcgcgcggcctgccgggcgataccggcccgaaaggcgatcgcggctttgatggcctgccgggcctgccgggcgaaaaaggccagcgcggcgattttggccatgtgggccagccgggcccgccgggcgaagatggcgaacgcggcgcggaaggcccgccgggcccgaccggccaggcgggcgaaccgggcccgcgcggcctgctgggcccgcgcggcagcccgggcccgaccggccgcccgggcgtgaccggcattgatggcgcgccgggcgcgaaaggcaacgtgggcccgccgggcgaaccgggcccgccgggccagcagggcaaccatggcagccagggcctgccgggcccgcagggcctgattggcaccccgggcgaaaaaggcccgccgggcaacccgggcattccgggcctgccgggcagcgatggcccgctgggccatccgggccatgaaggcccgaccggcgaaaaaggcgcgcagggcccgccgggcagcgcgggcccgccgggctatccgggcccgcgcggcgtgaaaggcaccagcggcaaccgcggcctgcagggcgaaaaaggcgaaaaaggcgaagatggctttccgggctttaaaggcgatgtgggcctgaaaggcgatcagggcaaaccgggcgcgccgggcccgcgcggcgaagatggcccggaaggcccgaaaggccaggcgggccaggcgggcgaagaaggcccgccgggcagcgcgggcgaaaaaggcaaactgggcgtgccgggcctgccgggctatccgggccgcccgggcccgaaaggcagcattggctttccgggcccgctgggcccgattggcgaaaaaggcaaaagcggcaaaaccggccagccgggcctggaaggcgaacgcggcccgccgggcagccgcggcgaacgcggccagccgggcgcgaccggccagccgggcccgaaaggcgatgtgggccaggatggcgcgccgggcattccgggcgaaaaaggcctgccgggcctgcagggcccgccgggctttccgggcccgaaaggcccgccgggccatcagggcaaagatggccgcccgggccatccgggccagcgcggcgaactgggctttcagggccagaccggcccgccgggcccggcgggcgtgctgggcccgcagggcaaaaccggcgaagtgggcccgctgggcgaacgcggcccgccgggcccgccgggcccgccgggcgaacagggcctgccgggcctggaaggccgcgaaggcgcgaaaggcgaactgggcccgccgggcccgctgggcaaagaaggcccggcgggcctgcgcggctttccgggcccgaaaggcggcccgggcgatccgggcccgaccggcctgaaaggcgataaaggcccgccgggcccggtgggcgcgaacggcagcccgggcgaacgcggcccgctgggcccggcgggcggcattggcctgccgggccagagcggcagcgaaggcccggtgggcccggcgggcaaaaaaggcagccgcggcgaacgcggcccgccgggcccgaccggcaaagatggcattccgggcccgctgggcccgctgggcccgccgggcgcggcgggcccgagcggcgaagaaggcgataaaggcgatgtgggcgcgccgggccataaaggcagcaaaggcgataaaggcgatgcgggcccgccgggccagccgggcattcgcggcccggcgggccatccgggcccgccgggcgcggatggcgcgcagggccgccgcggcccgccgggcctgtttggccagaaaggcgatgatggcgtgcgcggctttgtgggcgtgattggcccgccgggcctgcagggcctgccgggcccgccgggcgaaaaaggcgaagtgggcgatgtgggcagcatgggcccgcatggcgcgccgggcccgcgcggcccgcagggcccgaccggcagcgaaggcaccccgggcctgccgggcggcgtgggccagccgggcgcggtgggcgaaaaaggcgaacgcggcgatgcgggcgatccgggcccgccgggcgcgccgggcattccgggcccgaaaggcgatattggcgaaaaaggcgatagcggcccgagcggcgcggcgggcccgccgggcaaaaaaggcccgccgggcgaagatggcgcgaaaggcagcgtgggcccgaccggcctgccgggcgatctgggcccgccgggcgatccgggcgtgagcggcattgatggcagcccgggcgaaaaaggcgatccgggcgatgtgggcggcccgggcccgccgggcgcgagcggcgaaccgggcgcgccgggcccgccgggcaaacgcggcccgagcggccatatgggccgcgaaggccgcgaaggcgaaaaaggcgcgaaaggcgaaccgggcccggatggcccgccgggccgcaccggcccgatgggcgcgcgcggcccgccgggccgcgtgggcccggaaggcctgcgcggcattccgggcccggtgggcgaaccgggcctgctgggcgcgccgggccagatgggcccgccgggcccgctgggcccgagcggcctgccgggcctgaaaggcgataccggcccgaaaggcgaaaaaggccatattggcctgattggcctgattggcccgccgggcgaagcgggcgaaaaaggcgatcagggcctgccgggcgtgcagggcccgccgggcccgaaaggcgatccgggcccgccgggcccgattggcagcctgggccatccgggcccgccgggcgtggcgggcccgctgggccagaaaggcagcaaaggcagcccgggcagcatgggcccgcgcggcgataccggcccggcgggcccgccgggcccgccgggcgcgccg

SEQ ID NO: 1020 - DNA, 1008 bp, Homo sapiens
ggcccgccgggcctgcgcggcgatccgggctttgaaggcgaacgcggcaaaccgggcctgccgggcgaaaaaggcgaagcgggcgatccgggccgcccgggcgatctgggcccggtgggctatcagggcatgaaaggcgaaaaaggcagccgcggcgaaaaaggcagccgcggcccgaaaggctataaaggcgaaaaaggcaaacgcggcattgatggcgtggatggcgtgaaaggcgaaatgggctatccgggcctgccgggctgcaaaggcagcccgggctttgatggcattcagggcccgccgggcccgaaaggcgatccgggcgcgtttggcctgaaaggcgaaaaaggcgaaccgggcgcggatggcgaagcgggccgcccgggcagcagcggcccgagcggcgatgaaggccagccgggcgaaccgggcccgccgggcgaaaaaggcgaagcgggcgatgaaggcaacccgggcccggatggcgcgccgggcgaacgcggcggcccgggcgaacgcggcccgcgcggcaccccgggcacccgcggcccgcgcggcgatccgggcgaagcgggcccgcagggcgatcagggccgcgaaggcccggtgggcgtgccgggcgatccgggcgaagcgggcccgattggcccgaaaggctatcgcggcgatgaaggcccgccgggcagcgaaggcgcgcgcggcgcgccgggcccggcgggcccgccgggcgatccgggcctgatgggcgaacgcggcgaagatggcccggcgggcaacggcaccgaaggctttccgggctttccgggctatccgggcaaccgcggcgcgccgggcattaacggcaccaaaggctatccgggcctgaaaggcgatgaaggcgaagcgggcgatccgggcgatgataacaacgatattgcgccgcgcggcgtgaaaggcgcgaaaggctatcgcggcccggaaggcccgcagggcccgccgggccatcagggcccgccgggcccggat

SEQ ID NO: 1021 - DNA, 1005 bp, Homo sapiens
ggcccgagcggcccgaaaggctatcgcggccagaaaggcgcgaaaggcaacatgggcgaaccgggcgaaccgggccagaaaggccgccagggcgatccgggcattgaaggcccgattggctttccgggcccgaaaggcgtgccgggctttaaaggcgaaaaaggcgaatttggcgcggatggccgcaaaggcgcgccgggcctggcgggcaaaaacggcaccgatggccagaaaggcaaactgggccgcattggcccgccgggctgcaaaggcgatccgggcaaccgcggcccggatggctatccgggcgaagcgggcagcccgggcgaacgcggcgatcagggcggcaaaggcgatccgggccgcccgggccgccgcggcccgccgggcgaaattggcgcgaaaggcagcaaaggctatcagggcaacagcggcgcgccgggcagcccgggcgtgaaaggcgcgaaaggcggcccgggcccgcgcggcccgaaaggcgaaccgggccgccgcggcgatccgggcaccaaaggcagcccgggcagcgatggcccgaaaggcgaaaaaggcgatccgggcccggaaggcccgcgcggcctggcgggcgaagtgggcaacaaaggcgcgaaaggcgatcgcggcctgccgggcccgcgcggcccgcagggcgcgctgggcgaaccgggcaaacagggcagccgcggcgatccgggcgatgcgggcccgcgcggcgatagcggccagccgggcccgaaaggcgatccgggccgcccgggctttagctatccgggcccgcgcggcgcgccgggcgaaaaaggcgaaccgggcccgcgcggcccggaaggcggccgcggcgattttggcctgaaaggcgaaccgggccgcaaaggcgaaaaaggcgaaccggcggatccgggcccgccgggcgaaccgggcccgcgcggcccgcgcggcgtgccgggcccggaaggcgaaccgggcccgccgggcgatccgggcctgacc

SEQ ID NO: 1022 - DNA, 1008 bp, Homo sapiens
ggccagcgcggcgatcgcggcccgattggcagcattggcccgaaaggcattccgggcgaagatggctatcgcggctatccgggcgatgaaggcggcccgggcgaacgcggcccgccgggcgtgaacggcacccagggctttcagggctgcccgggccagcgcggcgtgaaaggcagccgcggctttccgggcgaaaaaggcgaagtgggcgaaattggcctggatggcctggatggcgaagatggcgataaaggcctgccgggcagcagcggcgaaaaaggcaacccgggccgccgcggcgataaaggcccgcgcggcgaaaaaggcgaacgcggcgatgtgggcattcgcggcgatccgggcaacccgggccaggatagccaggaacgcggcccgaaaggcgaaaccggcgatctgggcccgatgggcgtgccgggccgcgatggcgtgccgggcggcccgggcgaaaccggcaaaaacggcggctttggccgccgcggcccgccgggcgcgaaaggcaacaaaggcggcccgggccagccgggctttgaaggcgaacagggcacccgcggcgcgcagggcccggcgggcccggcgggcccgccgggcctgattggcgaacagggcattagcggcccgcgcggcagcggcggcgcggcgggcgcgccgggcgaacgcggccgcaccggcccgctgggccgcaaaggcgaaccgggcgaaccgggcccgaaaggcggcattggcaaccgcggcccgcgcggcgaaaccggcgatgatggccgcgatggcgtgggcagcgaaggccgccgcggcaaaaaaggcgaacgcggctttccgggctatccgggcccgaaaggcaacccgggcgaaccgggcctgaacggcaccaccggcccgaaaggcattcgcggccgccgcggcaacagcggcccgccgggcattgtgggccagaaaggcgatccgggctatccgggcccggcgggcccgaaaggcaaccgcggcgatagc

SEQ ID NO: 1023 - DNA, 1008 bp, Homo sapiens
ggcattccgggcccgcatggcacccgcggcctgcaggcgatgaaaggcagccagggcctgaaaggcagccgcggccatcgcggcgaagatggcaacccgggcgtgcgcggcgataccggcccgcagggcgataaaggcattgcgggctgcccgggcgcgtggggccagaaaggcctgaaaggctttagcggcccgaaaggcggccatggcgatgatggcattgatggcctggatggcgaagaaggctgccatggctttccgggcattaaaggcgaaaaaggcgatccgggcagccagggcagcccgggcagccgcggcgcgccgggccagtatggcgaaaaaggctttccgggcgatccgggcaacccgggccagaacaacaacattaaaggccagaaaggcagcaaaggcgaacagggccgccagggccgcagcggccagaaaggcgtgcagggcagcccgagcagccgcggcagccgcggccgcgaaggccagcgcggcctgcgcggcgtgagcggcgaaccgggcaacccgggcccgaccggcaccctgggcgcggaaggcctgcagggcccgcagggcagccagggcaacccgggccgcaaaggcgaaaaaggcagccagggccagaaaggcccgcagggcagcccgggcctgatgggcgcgaaaggcagcaccggccgcccgggcctgctgggcaaaaaaggcgaaccgggcctgccgggcgatctgggcccggtgggccagaccggccagcgcggccgccagggcgatagcggcattccgggctatggccagatgggccgcaaaggcgtgaaaggcccgcgcggctttccgggcgatgcgggccagaaaggcgatattggcaacccgggcattccgggcggcccgggcccgaaaggctttcgcggcctggcgctgaccgtgggcctgaaaggcgaagaaggcagccgcggcctgccgggcccgccgggccagcgcggcattaaaggcatggcgggccagccg

SEQ ID NO: 1024 - DNA, 1008 bp, Homo sapiens
ggcggcgatggcaccatgggcgatccgggcccgccgggcaaacgcggcccgccgggctttaaaggcagcgaaggctatctgggcgaagaaggcattgcgggcgaacgcggcgcgccgggcccggtgggcgaacagggcaccaaaggctgctatggcaccaaaggcccgaaaggcaaccgcggcctgaacggccaggaaggcgaagtgggcgaaaacggcattgatggcctgaacggcgaacagggcgataacggcctgccgggccgcaaaggcgaaaaaggcgatgaaggcagccagggcagcccgggcaaacgcggcaccccgggcgatcgcggcgcgaaaggcctgcgcggcgatccgggcgcgccgggcgtggatagcagcattgaaggcccgaccggcctgaaaggcgaacgcggccgccagggccgccgcggctggccgggcccgccgggcaccccgggcagccgccgcaaaaccgcggcgcatggccgccgcggccataccggcccgcagggcaccgcgggcattccgggcccggatggcctggaaggcagcctgggcctgaaaggcccgcagggcccgcgcggcgaagcgggcgtgaaaggcgaaaaaggcggcgtgggcagcaaaggcccgcagggcccgccgggcccgggcggcgaagcgggcaaccagggccgcctgggcagccagggcaacaaaggcgaaccgggcgatctgggcgaaaaaggcgcggtgggctttccgggcccgcgcggcctgcagggcaacgatggcagcccgggctatggcagcgtgggccgcaaaggcgcgaaaggccaggaaggctttccgggcgaaagcggcccgaaaggcgaaattggcgatccgggcggcccgggcgaaaccggcctgaaaggcgcgcgcggcaaaatgattagcgcgggcctgccgggcgaaatgggcagcccgggcgaaccgggcccgccgggccgcaaaggcgtgaaaggcgcgaaaggcctggcg

SEQ ID NO: 1025 - DNA, 4590 bp, Homo sapiens
ggccagaaaggcgaaccgggcgaaatgggcctgcgcggccaggtgggcccgccgggcgatccgggcctgccgggccgcaccggcgcgccgggcccgcagggcccgccgggcagcgcgaccgcgaaaggcgaacgcggctttccgggcgcggatggccgcccgggcagcccgggccgcgcgggcaacccgggcaccccgggcgcgccgggcctgaaaggcagcccgggcctgccgggcccgcgcggcgatccgggcgaacgcggcccgcgcggcccgaaaggcgaaccgggcgcgccgggccaggtgattggcggcgaaggcccgggcctgccgggccgcaaaggcgatccgggcccgagcggcccgccgggcccgcgcggcccgctgggcgatccgggcccgcgcggcccgccgggcctgccgggcaccgcgatgaaaggcgataaaggcgatcgcggcgaacgcggcccgccgggcccgggcgaaggcggcattgcgccgggcgaaccgggcctgccgggcctgccgggcagcccgggcccgcagggcccggtgggcccgccgggcaaaaaaggcgaaaaaggcgatagcgaagatggcgcgccgggcctgccgggccagccgggcagcccgggcgaacagggcccgcgcggcccgccgggcgcgattggcccgaaaggcgatcgcggctttccgggcccgctgggcgaagcgggcgaaaaaggcgaacgcggcccgccgggcccggcgggcagccgcggcctgccgggcgtggcgggccgcccgggcgcgaaaggcccggaaggcccgccgggcccgaccggccgccagggcgaaaaaggcgaaccgggccgcccgggcgatccggcggtggtgggcccggcggtggcgggcccgaaaggcgaaaaaggcgatgtgggcccggcgggcccgcgcggcgcgaccggcgtgcagggcgaacgcggcccgccgggcctggtgctgccgggcgatccgggcccgaaaggcgatccgggcgatcgcggcccgattggcctgaccggccgcgcgggcccgccgggcgatagcggcccgccgggcgaaaaaggcgatccgggccgcccgggcccgccgggcccggtgggcccgcgcggccgcgatggcgaagtgggcgaaaaaggcgatgaaggcccgccgggcgatccgggcctgccgggcaaagcgggcgaacgcggcctgcgcggcgcgccgggcgtgcgcggcccggtgggcgaaaaaggcgatcagggcgatccgggcgaagatggccgcaacggcagcccgggcagcagcggcccgaaaggcgatcgcggcgaaccgggcccgccgggcccgccgggccgcctggtggataccggcccgggcgcgcgcgaaaaaggcgaaccgggcgatcgcggccaggaaggcccgcgcggcccgaaaggcgatccgggcctgccgggcgcgccgggcgaacgcggcattgaaggctttcgcggcccgccgggcccgcagggcgatccgggcgtgcgcggcccggcgggcgaaaaaggcgatcgcggcccgccgggcctggatggccgcagcggcctggatggcaaaccgggcgcggcgggcccgagcggcccgaacggcgcggcgggcaaagcgggcgatccgggccgcgatggcctgccgggcctgcgcggcgaacagggcctgccgggcccgagcggcccgccgggcctgccgggcaaaccgggcgaagatggcaaaccgggcctgaacggcaaaaacggcgaaccgggcgatccgggcgaagatggccgcaaaggcgaaaaaggcgatagcggcgcgagcggccgcgaaggccgcgatggcccgaaaggcgaacgcggcgcgccgggcattctgggcccgcagggcccgccgggcctgccgggcccggtgggcccgccgggccagggctttccgggcgtgccgggcggcaccggcccgaaaggcgatcgcggcgaaaccggcagcaaaggcgaacagggcctgccgggcgaacgcggcctgcgcggcgaaccgggcagcgtgccgaacgtggatcgcctgctggaaaccgcgggcattaaagcgagcgcgctgcgcgaaattgtggaaacctgggatgaaagcagcggcagctttctgccggtgccggaacgccgccgcggcccgaaaggcgatagcggcgaacagggcccgccgggcaaagaaggcccgattggctttccgggcgaacgcggcctgaaaggcgatcgcggcgatccgggcccgcagggcccgccgggcctggcgctgggcgaacgcggcccgccgggcccgagcggcctggcgggcgaaccgggcaaaccgggcattccgggcctgccgggccgcgcgggcggcgtgggcgaagcgggccgcccgggcgaacgcggcgaacgcggcgaaaaaggcgaacgcggcgaacagggccgcgatggcccgccgggcctgccgggcaccccgggcccgccgggcccgccgggcccgaaagtgagcgtggatgaaccgggcccgggcctgagcggcgaacagggcccgccgggcctgaaaggcgcgaaaggcgaaccgggcagcaacggcgatcagggcccgaaaggcgatcgcggcgtgccgggcattaaaggcgatcgcggcgaaccgggcccgcgcggccaggatggcaacccgggcctgccgggcgaacgcggcatggcgggcccggaaggcaaaccgggcctgcagggcccgcgcggcccgccgggcccggtgggcggccatggcgatccgggcccgccgggcgcgccgggcctggcgggcccggcgggcccgcagggcccgagcggcctgaaaggcgaaccgggcgaaaccggcccgccgggccgcggcctgaccggcccgaccggcgcggtgggcctgccgggcccgccgggcccgagcggcctggtgggcccgcagggcagcccgggcctgccgggccaggtgggcgaaaccggcaaaccgggcgcgccgggccgcgatggcgcgagcggcaaagatggcgatcgcggcagcccgggcgtgccgggcagcccgggcctgccgggcccggtgggcccgaaaggcgaaccgggcccgaccggcgcgccgggccaggcggtggtgggcctgccgggcgcgaaaggcgaaaaaggcgcgccgggcggcctggcgggcgatctggtgggcgaaccgggcgcgaaaggcgatcgcggcctgccgggcccgcgcggcgaaaaaggcgaagcgggccgcgcgggcgaaccgggcgatccgggcgaagatggccagaaaggcgcgccgggcccgaaaggctttaaaggcgatccgggcgtgggcgtgccgggcagcccgggcccgccgggcccgccgggcgtgaaaggcgatctgggcctgccgggcctgccgggcgcgccgggcgtggtgggctttccgggccagaccggcccgcgcggcgaaatgggccagccgggcccgagcggcgaacgcggcctggcgggcccgccgggccgcgaaggcattccgggcccgctgggcccgccgggcccgccgggcagcgtgggcccgccgggcgcgagcggcctgaaaggcgataaaggcgatccgggcgtgggcctgccgggcccgcgcggcgaacgcggcgaaccgggcattcgcggcgaagatggccgcccgggccaggaaggcccgcgcggcctgaccggcccgccgggcagccgcggcgaacgcggcgaaaaaggcgatgtgggcagcgcgggcctgaaaggcgataaaggcgatagcgcggtgattctgggcccgccgggcccgcgcggcgcgaaaggcgatatgggcgaacgcggcccgcgcggcctggatggcgataaaggcccgcgcggcgataacggcgatccgggcgataaaggcagcaaaggcgaaccgggcgataaaggcagcgcgggcctgccgggcctgcgcggcctgctgggcccgcagggccagccgggcgcggcgggcattccgggcgatccgggcagcccgggcaaagatggcgtgccgggcattcgcggcgaaaaaggcgatgtgggctttatgggcccgcgcggcctgaaaggcgaacgcggcgtgaaaggcgcgtgcggcctggatggcgaaaaaggcgataaaggcgaagcgggcccgccgggccgcccgggcctggcgggccataaaggcgaaatgggcgaaccgggcgtgccgggccagagcggcgcgccgggcaaagaaggcctgattggcccgaaaggcgatcgcggctttgatggccagccgggcccgaaaggcgatcagggcgaaaaaggcgaacgcggcaccccgggcattggcggctttccgggcccgagcggcaacgatggcagcgcgggcccgccgggcccgccgggcagcgtgggcccgcgcggcccggaaggcctgcagggccagaaaggcgaacgcggcccgccgggcgaacgcgtggtgggcgcgccgggcgtgccgggcgcgccgggcgaacgcggcgaacagggccgcccgggcccggcgggcccgcgcggcgaaaaaggcgaagcg

SEQ ID NO: 1026 - DNA, 1362 bp, Homo sapiens
ggcgaacagggcccgcgcggcgaaccgggcccgcgcggcccgccgggcccgccgggcctgccgggccatggcattccgggcattaaaggcaaaccgggcccgcagggctatccgggcgtgggcaaaccgggcatgccgggcatgccgggcaaaccgggcgcgatgggcatgccgggcgcgaaaggcgaaattggccagaaaggcgaaattggcccgatgggcattccgggcccgcagggcccgccgggcccgcatggcctgccgggcattggcaaaccgggcggcccgggcctgccgggccagccgggcccgaaaggcgatcgcggcccgaaaggcctgccgggcccgcagggcctgcgcggcccgaaaggcgataaaggctttggcatgccgggcgcgccgggcgtgaaaggcccgccgggcatgcatggcccgccgggcccggtgggcctgccgggcgtgggcaaaccgggcgtgaccggctttccgggcccgcagggcccgctgggcaaaccgggcgcgccgggcgaaccgggcccgcagggcccgattggcgtgccgggcgtgcagggcccgccgggcattccgggcattggcaaaccgggccaggatggcattccgggccagccgggctttccgggcggcaaaggcgaacagggcctgccgggcctgccgggcccgccgggcctgccgggcattggcaaaccgggctttccgggcccgaaaggcgatcgcggcatgggcggcgtgccgggcgcgctgggcccgcgcggcgaaaaaggcccgattggcgcgccgggcattggcggcccgccgggcgaaccgggcctgccgggcattccgggcccgatgggcccgccgggcgcgattggctttccgggcccgaaaggcgaaggcggcattgtgggcccgcagggcccgccgggcccgaaaggcgaaccgggcctgcagggctttccgggcaaaccgggctttctgggcgaagtgggcccgccgggcatgcgcggcctgccgggcccgattggcccgaaaggcgaagcgggccagaaaggcgtgccgggcctgccgggcgtgccgggcctgctgggcccgaaaggcgaaccgggcattccgggcgatcagggcctgcagggcccgccgggcattccgggcattggcggcccgagcggcccgattggcccgccgggcattccgggcccgaaaggcgaaccgggcctgccgggcccgccgggctttccgggcattggcaaaccgggcgtggcgggcctgcatggcccgccgggcaaaccgggcgcgctgggcccgcagggccagccgggcctgccgggcccgccgggcccgccgggcccgccgggcccgccg

SEQ ID NO: 1027 - DNA, 1380 bp, Homo sapiens
ggcgaaccgggcccgccgggcaaaccgggcccgcgcggcccgccgggcccgccgggctttccgggcaaaccgggcatgggcaaaccgggcctgcatggccagccgggcccggcgggcccgccgggctttagccgcatgggcaaagcgggcccgccgggcctgccgggcaaagtgggcccgccgggccagccgggcctgcgcggcgaaccgggcattcgcggcgatcagggcctgcgcggcccgccgggcccgccgggcctgccgggcccgagcggcattaccattccgggcaaaccgggcgcgcagggcgtgccgggcccgccgggctttcagggcgaaccgggcccgcagggcgaaccgggcccgccgggcgatcgcggcctgaaaggcgataacggcgtgggccagccgggcctgccgggcgcgccgggccagggcggcgcgccgggcccgccgggcctgccgggcccggcgggcctgggcaaaccgggcctggatggcctgccgggcgcgccgggcgataaaggcgaaagcggcccgccgggcgtgccgggcccgcgcggcgaaccgggcgcggtgggcccgaaaggcccgccgggcgtggatggcgtgggcgtgccgggcgcggcgggcctgccgggcccgcagggcccgagcggcgcgaaaggcgaaccgggcacccgcggcccgccgggcctgattggcccgaccggctatggcatgccgggcctgccgggcccgaaaggcgatcgcggcccggcgggcgtgccgggcctgctgggcgatcgcggcgaaccgggcgaagatggcgaaccgggcgaacagggcccgcagggcctgggcggcccgccgggcctgccgggcagcgcgggcctgccgggccgccgcggcccgccgggcccgaaaggcgaagcgggcccgggcggcccgccgggcgtgccgggcattcgcggcgatcagggcccgagcggcctggcgggcaaaccgggcgtgccgggcgaacgcggcctgccgggcgcgcatggcccgccgggcccgaccggcccgaaaggcgaaccgggctttaccggccgcccgggcggcccgggcgtggcgggcgcgctgggccagaaaggcgatctgggcctgccgggccagccgggcctgcgcggcccgagcggcattccgggcctgcagggcccggcgggcccgattggcccgcagggcctgccgggcctgaaaggcgaaccgggcctgccgggcccgccgggcgaaggccgcgcgggcgaaccgggcaccgcgggcccgaccggcccgccgggcgtgccgggcagcccgggcattaccggcccgccgggcccgccgggcccgccgggcccgccgggcgcgccgggcgcgttt

SEQ ID NO: 1028 - DNA, 1899 bp, Homo sapiens
ggcccgccgggcgaacagggcccgccgggcccgccgggcccgccgggcgtgccgggcattgatggcattgatggcgatcgcggcccgaaaggcccgccgggcccgccgggcccggcgggcgaaccgggcaaaccgggcgcgccgggcaaaccgggcaccccgggcgcggatggcctgaccggcccggatggcagcccgggcagcattggcagcaaaggccagaaaggcgaaccgggcgtgccgggcagccgcggctttccgggccgcggcattccgggcccgccgggcccgccgggcaccgcgggcctgccgggcgaactgggccgcgtgggcccggtgggcgatccgggccgccgcggcccgccgggcccgccgggcccgccgggcccgcgcggcaccattggctttcatgatggcgatccgctgtgcccgaacgcgtgcccgccgggccgcagcggctatccgggcctgccgggcatgcgcggccataaaggcgcgaaaggcgaaattggcgaaccgggccgccagggccataaaggcgaagaaggcgatcagggcgaactgggcgaagtgggcgcgcagggcccgccgggcgcgcagggcctgcgcggcattaccggcattgtgggcgataaaggcgaaaaaggcgcgcgcggcctggatggcgaaccgggcccgcagggcctgccgggcgcgccgggcgatcagggccagcgcggcccgccgggcgaagcgggcccgaaaggcgatcgcggcgcggaaggcgcgcgcggcattccgggcctgccgggcccgaaaggcgataccggcctgccgggcgtggatggccgcgatggcattccgggcatgccgggcaccaaaggcgaaccgggcaaaccgggcccgccgggcgatgcgggcctgcagggcctgccgggcgtgccgggcattccgggcgcgaaaggcgtggcgggcgaaaaaggcagcaccggcgcgccgggcaaaccgggccagatgggcaacagcggcaaaccgggccagcagggcccgccgggcgaagtgggcccgcgcggcccgcagggcctgccgggcagccgcggcgaactgggcccggtgggcagcccgggcctgccgggcaaactgggcagcctgggcagcccgggcctgccgggcctgccgggcccgccgggcctgccgggcatgaaaggcgatcgcggcgtggtgggcgaaccgggcccgaaaggcgaacagggcgcgagcggcgaagaaggcgaagcgggcgaacgcggcgaactgggcgatattggcctgccgggcccgaaaggcagcgcgggcaacccgggcgaaccgggcctgcgcggcccggaaggcagccgcggcctgccgggcgtggaaggcccgcgcggcccgccgggcccgcgcggcgtgcagggcgaacagggcgcgaccggcctgccgggcgtgcagggcccgccgggccgcgcgccgaccgatcagcatattaaacaggtgtgcatgcgcgtgattcaggaacattttgcggaaatggcggcgagcctgaaacgcccggatagcggcgcgaccggcctgccgggccgcccgggcccgccgggcccgccgggcccgccgggcgaaaacggctttccgggccagatgggcattcgcggcctgccgggcattaaaggcccgccgggcgcgctgggcctgcgcggcccgaaaggcgatctgggcgaaaaaggcgaacgcggcccgccgggccgcggcccgaacggcctgccgggcgcgattggcctgccgggcgatccgggcccggcgagctatggccgcaacggccgcgatggcgaacgcggcccgccgggcgtggcgggcattccgggcgtgccgggcccgccgggcccgccgggcctgccgggcttttgc

SEQ ID NO: 1029 - DNA, 1452 bp, Homo sapiens
ggcatgaaaggcccgccgggcctgcagggcgtgaaaggccatgcgggcaaacgcggcattctgggcgatccgggccatcagggcaaaccgggcccgaaaggcgatgtgggcgcgagcggcgaacagggcattccgggcccgccgggcccgcagggcattcgcggctatccgggcatggcgggcccgaaaggcgaaaccggcccgcatggctataaaggcatggtgggcgcgattggcgcgaccggcccgccgggcgaagaaggcccgcgcggcccgccgggccgcgcgggcgaaaaaggcgatgaaggcagcccgggcattcgcggcccgcagggcattaccggcccgaaaggcgcgaccggcccgccgggcattaacggcaaagatggcaccccgggcaccccgggcatgaaaggcagcgcgggccaggcgggccagccgggcagcccgggccatcagggcctggcgggcgtgccgggccagccgggcaccaaaggcggcccgggcgatcagggcgaaccgggcccgcagggcctgccgggctttagcggcccgccgggcaaagaaggcgaaccgggcccgcgcggcgaaattggcccgcagggcattatgggccagaaaggcgatcagggcgaacgcggcccggtgggccagccgggcccgcagggccgccagggcccgaaaggcgaacagggcccgccgggcattccgggcccgcagggcctgccgggcgtgaaaggcgataaaggcagcccgggcaaaaccggcccgcgcggcaaagtgggcgatccgggcgtggcgggcctgccgggcgaaaaaggcgaaaaaggcgaaagcggcgaaccgggcccgaaaggccagcagggcgtgcgcggcgaaccgggctatccgggcccgagcggcgatgcgggcgcgccgggcgtgcagggctatccgggcccgccgggcccgcgcggcctggcgggcaaccgcggcgtgccgggccagccgggccgccagggcgtggaaggccgcgatgcgaccgatcagcatattgtggatgtggcgctgaaaatgctgcaggaacagctggcggaagtggcggtgagcgcgaaacgcgaagcgctgggcgcggtgggcatgatgggcccgccgggcccgccgggcccgccgggctatccgggcaaacagggcccgcatggccatccgggcccgcgcggcgtgccgggcattgtgggcgcggtgggccagattggcaacaccggcccgaaaggcaaacgcggcgaaaaaggcgatccgggcgaagtgggccgcggccatccgggcatgccgggcccgccgggcattccgggcctgccgggccgcccgggccaggcgattaacggcaaagatggcgatcgcggcagcccgggcgcgccgggcgaagcgggccgcccgggcctgccgggcccggtgggcctgccgggcttttgc

SEQ ID NO: 1030 - DNA, 1902 bp, Homo sapiens
ggcctgccgggcccgccgggcccgccgggcccgccgggcaaaccgggccaggatggcattgatggcgaagcgggcccgccgggcctgccgggcccgccgggcccgaaaggcgcgccgggcaaaccgggcaaaccgggcgaagcgggcctgccgggcctgccgggcgtggatggcctgaccggccgcgatggcccgccgggcccgaaaggcgcgccgggcgaacgcggcagcctgggcccgccgggcccgccgggcctgggcggcaaaggcctgccgggcccgccgggcgaagcgggcgtgagcggcccgccgggcggcattggcctgcgcggcccgccgggcccgagcggcctgccgggcctgccgggcccgccgggcccgccgggcccgccgggccatccgggcgtgctgccggaaggcgcgaccgatctgcagtgcccgagcatttgcccgccgggcccgccgggcccgccgggcatgccgggctttaaaggcccgaccggctataaaggcgaacagggcgaagtgggcaaagatggcgaaaaaggcgatccgggcccgccgggcccggcgggcctgccgggcagcgtgggcctgcagggcccgcgcggcctgcgcggcctgccgggcccgctgggcccgccgggcgatcgcggcccgattggctttcgcggcccgccgggcattccgggcgcgccgggcaaagcgggcgatcgcggcgaacgcggcccggaaggctttcgcggcccgaaaggcgatctgggccgcccgggcccgaaaggcaccccgggcgtggcgggcccgagcggcgaaccgggcatgccgggcaaagatggccagaacggcgtgccgggcctggatggccagaaaggcgaagcgggccgcaacggcgcgccgggcgaaaaaggcccgaacggcctgccgggcctgccgggccgcgcgggcagcaaaggcgaaaaaggcgaacgcggccgcgcgggcgaactgggcgaagcgggcccgagcggcgaaccgggcgtgccgggcgatgcgggcatgccgggcgaacgcggcgaagcgggccatcgcggcagcgcgggcgcgctgggcccgcagggcccgccgggcgcgccgggcgtgcgcggctttcagggccagaaaggcagcatgggcgatccgggcctgccgggcccgcagggcctgcgcggcgatgtgggcgatcgcggcccgggcggcgcggcgggcccgaaaggcgatcagggcattgcgggcagcgatggcctgccgggcgataaaggcgaactgggcccgagcggcctggtgggcccgaaaggcgaaagcggcagccgcggcgaactgggcccgaaaggcacccagggcccgaacggcaccagcggcgtgcagggcgtgccgggcccgccgggcccgctgggcctgcagggcgtgccgggcgtgccgggcattaccggcaaaccgggcgtgccgggcaaagaagcgagcgaacagcgcattcgcgaactgtgcggcggcatgattagcgaacagattgcgcagctggcggcgcatctgcgcaaaccgctggcgccgggcagcattggccgcccgggcccggcgggcccgccgggcccgccgggcccgccgggcagcattggccatccgggcgcgcgcggcccgccgggctatcgcggcccgaccggcgaactgggcgatccgggcccgcgcggcaaccagggcgatcgcggcgataaaggcgcggcgggcgcgggcctggatggcccggaaggcgatcagggcccgcagggcccgcagggcgtgccgggcaccagcaaagatggccaggatggcgcgccgggcgaaccgggcccgccgggcgatccgggcctgccgggcgcgattggcgcgcagggcaccccgggcatttgc

SEQ ID NO: 1031 - DNA, 1389 bp, Homo sapiens
ggcgaacagggcaccccgggcccgccgggcccggcgggcccgcgcggccatccgggcccgagcggcccgccgggcaaaccgggctatggcagcccgggcctgcagggcgaaccgggcctgccgggcccgccgggcccgagcgcggtgggcaaaccgggcgtgccgggcctgccgggcaaaccgggcgaacgcggcccgtatggcccgaaaggcgatgtgggcccggcgggcctgccgggcccgcgcggcccgccgggcccgccgggcattccgggcccggcgggcattagcgtgccgggcaaaccgggccagcagggcccgaccggcgcgccgggcccgcgcggctttccgggcgaaaaaggcgcgccgggcgtgccgggcatgaacggccagaaaggcgaaatgggctatggcgcgccgggccgcccgggcgaacgcggcctgccgggcccgcagggcccgaccggcccgagcggcccgccgggcgtgggcaaacgcggcgaaaacggcgtgccgggccagccgggcattaaaggcgatcgcggctttccgggcgaaatgggcccgattggcccgccgggcccgcagggcccgccgggcgaacgcggcccggaaggcattggcaaaccgggcgcggcgggcgcgccgggccagccgggcattccgggcaccaaaggcctgccgggcgcgccgggcattgcgggcccgccgggcccgccgggctttggcaaaccgggcctgccgggcctgaaaggcgaacgcggcccggcgggcctgccgggcggcccgggcgcgaaaggcgaacagggcccggcgggcctgccgggcaaaccgggcctgaccggcccgccgggcaacatgggcccgcagggcccgaaaggcattccgggcagccatggcctgccgggcccgaaaggcgaaaccggcccggcgggcccggcgggctatccgggcgcgaaaggcgaacgcggcagcccgggcagcgatggcaaaccgggctatccgggcaaaccgggcctggatggcccgaaaggcaacccgggcctgccgggcccgaaaggcgatccgggcgtgggcggcccgccgggcctgccgggcccggtgggcccggcgggcgcgaaaggcatgccgggccataacggcgaagcgggcccgcgcggcgcgccgggcattccgggcacccgcggcccgattggcccgccgggcattccgggctttccgggcagcaaaggcgatccgggcagcccgggcccgccgggcccggcgggcattgcgaccaaaggcctgaacggcccgaccggcccgccgggcccgccgggcccgcgcggccatagcggcgaaccgggcctgccgggcccgccgggcccgccgggcccgccgggccaggcg

SEQ ID NO: 1032 - DNA, 3042 bp, Homo sapiens
ggcccgccgggcccgatgggcctgaccggccgcccgggcccggtgggcggcccgggcagcagcggcgcgaaaggcgaaagcggcgatccgggcccgcagggcccgcgcggcgtgcagggcccgccgggcccgaccggcaaaccgggcaaacgcggccgcccgggcgcggatggcggccgcggcatgccgggcgaaccgggcgcgaaaggcgatcgcggctttgatggcctgccgggcctgccgggcgataaaggccatcgcggcgaacgcggcccgcagggcccgccgggcccgccgggcgatgatggcatgcgcggcgaagatggcgaaattggcccgcgcggcctgccgggcgaagcgggcccgcgcggcctgctgggcccgcgcggcaccccgggcgcgccgggccagccgggcatggcgggcgtggatggcccgccgggcccgaaaggcaacatgggcccgcagggcgaaccgggcccgccgggccagcagggcaacccgggcccgcagggcctgccgggcccgcagggcccgattggcccgccgggcgaaaaaggcccgcagggcaaaccgggcctggcgggcctgccgggcgcggatggcccgccgggccatccgggcaaagaaggccagagcggcgaaaaaggcgcgctgggcccgccgggcccgcagggcccgattggctatccgggcccgcgcggcgtgaaaggcgcggatggcgtgcgcggcctgaaaggcagcaaaggcgaaaaaggcgaagatggctttccgggctttaaaggcgatatgggcctgaaaggcgatcgcggcgaagtgggccagattggcccgcgcggcgaagatggcccggaaggcccgaaaggccgcgcgggcccgaccggcgatccgggcccgagcggccaggcgggcgaaaaaggcaaactgggcgtgccgggcctgccgggctatccgggccgccagggcccgaaaggcagcaccggctttccgggctttccgggcgcgaacggcgaaaaaggcgcgcgcggcgtggcgggcaaaccgggcccgcgcggccagcgcggcccgaccggcccgcgcggcagccgcggcgcgcgcggcccgaccggcaaaccgggcccgaaaggcaccagcggcggcgatggcccgccgggcccgccgggcgaacgcggcccgcagggcccgcagggcccggtgggctttccgggcccgaaaggcccgccgggcccgccgggcaaagatggcctgccgggccatccgggccagcgcggcgaaaccggctttcagggcaaaaccggcccgccgggcccgggcggcgtggtgggcccgcagggcccgaccggcgaaaccggcccgattggcgaacgcggccatccgggcccgccgggcccgccgggcgaacagggcctgccgggcgcggcgggcaaagaaggcgcgaaaggcgatccgggcccgcagggcattagcggcaaagatggcccggcgggcctgcgcggctttccgggcgaacgcggcctgccgggcgcgcagggcgcgccgggcctgaaaggcggcgaaggcccgcagggcccgccgggcccggtgggcagcccgggcgaacgcggcagcgcgggcaccgcgggcccgattggcctgccgggccgcccgggcccgcagggcccgccgggcccggcgggcgaaaaaggcgcgccgggcgaaaaaggcccgcagggcccggcgggccgcgatggcgtgcagggcccggtgggcctgccgggcccggcgggcccggcgggcagcccgggcgaagatggcgataaaggcgaaattggcgaaccgggccagaaaggcagcaaaggcgataaaggcgaaaacggcccgccgggcccgccgggcctgcagggcccggtgggcgcgccgggcattgcgggcggcgatggcgaaccgggcccgcgcggccagcagggcatgtttggccagaaaggcgatgaaggcgcgcgcggctttccgggcccgccgggcccgattggcctgcagggcctgccgggcccgccgggcgaaaaaggcgaaaacggcgatgtgggcccgatgggcccgccgggcccgccgggcccgcgcggcccgcagggcccgaacggcgcggatggcccgcagggcccgccgggcagcgtgggcagcgtgggcggcgtgggcgaaaaaggcgaaccgggcgaagcgggcaacccgggcccgccgggcgaagcgggcgtgggcggcccgaaaggcgaacgcggcgaaaaaggcgaagcgggcccgccgggcgcggcgggcccgccgggcgcgaaaggcccgccgggcgatgatggcccgaaaggcaacccgggcccggtgggctttccgggcgatccgggcccgccgggcgaaccgggcccggcgggccaggatggcgtgggcggcgataaaggcgaagatggcgatccgggccagccgggcccgccgggcccgagcggcgaagcgggcccgccgggcccgccgggcaaacgcggcccgccgggcgcggcgggcgcggaaggccgccagggcgaaaaaggcgcgaaaggcgaagcgggcgcggaaggcccgccgggcaaaaccggcccggtgggcccgcagggcccggcgggcaaaccgggcccggaaggcctgcgcggcattccgggcccggtgggcgaacagggcctgccgggcgcggcgggccaggatggcccgccgggcccgatgggcccgccgggcctgccgggcctgaaaggcgatccgggcagcaaaggcgaaaaaggccatccgggcctgattggcctgattggcccgccgggcgaacagggcgaaaaaggcgatcgcggcctgccgggcacccagggcagcccgggcgcgaaaggcgatggcggcattccgggcccggcgggcccgctgggcccgccgggcccgccgggcctgccgggcccgcagggcccgaaaggcaacaaaggcagcaccggcccggcgggccagaaaggcgatagcggcctgccgggcccgccgggcagcccgggcccgccgggcgaagtg

SEQ ID NO: 1033 - DNA, 3042 bp, Homo sapiens
ggcccgccgggcccgatgggctataccggccgcccgggcccgctgggccagccgggcagcccgggcctgaaaggcgaaagcggcgatctgggcccgcagggcccgcgcggcccgcagggcctgaccggcccgccgggcaaagcgggccgccgcggccgcgcgggcgcggatggcgcgcgcggcatgccgggcgatccgggcgtgaaaggcgatcgcggctttgatggcctgccgggcctgccgggcgaaaaaggccatcgcggcgataccggcgcgcagggcctgccgggcccgccgggcgaagatggcgaacgcggcgatgatggcgaaattggcccgcgcggcctgccgggcgaaagcggcccgcgcggcctgctgggcccgaaaggcccgccgggcattccgggcccgccgggcgtgcgcggcatggatggcccgcagggcccgaaaggcagcctgggcccgcagggcgaaccgggcccgccgggccagcagggcaccccgggcacccagggcctgccgggcccgcagggcgcgattggcccgcatggcgaaaaaggcccgcagggcaaaccgggcctgccgggcatgccgggcagcgatggcccgccgggccatccgggcaaagaaggcccgccgggcaccaaaggcaaccagggcccgagcggcccgcagggcccgctgggctatccgggcccgcgcggcgtgaaaggcgtggatggcattcgcggcctgaaaggccataaaggcgaaaaaggcgaagatggctttccgggctttaaaggcgatattggcgtgaaaggcgatcgcggcgaagtgggcgtgccgggcagccgcggcgaagatggcccggaaggcccgaaaggccgcaccggcccgaccggcgatccgggcccgccgggcctgatgggcgaaaaaggcaaactgggcgtgccgggcctgccgggctatccgggccgccagggcccgaaaggcagcctgggctttccgggctttccgggcgcgagcggcgaaaaaggcgcgcgcggcctgagcggcaaaagcggcccgcgcggcgaacgcggcccgaccggcccgcgcggccagcgcggcccgcgcggcgcgaccggcaaaagcggcgcgaaaggcaccagcggcggcgatggcccgcatggcccgccgggcgaacgcggcctgccgggcccgcagggcccgaacggctttccgggcccgaaaggcccgccgggcccgccgggcaaagatggcctgccgggccatccgggccagcgcggcgaagtgggctttcagggcaaaaccggcccgccgggcccgccgggcgtggtgggcccgcagggcgcggcgggcgaaaccggcccgatgggcgaacgcggccatccgggcccgccgggcccgccgggcgaacagggcctgccgggcaccgcgggcaaagaaggcaccaaaggcgatccgggcccgccgggcgcgccgggcaaagatggcccggcgggcctgcgcggctttccgggcgaacgcggcctgccgggcaccgcgggcggcccgggcctgaaaggcaacgaaggcccgagcggcccgccgggcccggcgggcagcccgggcgaacgcggcgcggcgggcagcggcggcccgattggcccgccgggccgcccgggcccgcagggcccgccgggcgcggcgggcgaaaaaggcgtgccgggcgaaaaaggcccgattggcccgaccggccgcgatggcgtgcagggcccggtgggcctgccgggcccggcgggcccgccgggcgtggcgggcgaagatggcgataaaggcgaagtgggcgatccgggccagaaaggcaccaaaggcaacaaaggcgaacatggcccgccgggcccgccgggcccgattggcccggtgggccagccgggcgcggcgggcgcggatggcgaaccgggcgcgcgcggcccgcagggccattttggcgcgaaaggcgatgaaggcacccgcggctttaacggcccgccgggcccgattggcctgcagggcctgccgggcccgagcggcgaaaaaggcgaaaccggcgatgtgggcccgatgggcccgccgggcccgccgggcccgcgcggcccggcgggcccgaacggcgcggatggcccgcagggcccgccgggcggcgtgggcaacctgggcccgccgggcgaaaaaggcgaaccgggcgaaagcggcagcccgggcattcagggcgaaccgggcgtgaaaggcccgcgcggcgaacgcggcgaaaaaggcgaaagcggccagccgggcgaaccgggcccgccgggcccgaaaggcccgaccggcgatgatggcccgaaaggcaacccgggcccggtgggctttccgggcgatccgggcccgccgggcgaaggcggcccgcgcggccaggatggcgcgaaaggcgatcgcggcgaagatggcgaaccgggccagccgggcagcccgggcccgaccggcgaaaacggcccgccgggcccgctgggcaaacgcggcccggcgggcagcccgggcagcgaaggccgccagggcggcaaaggcgcgaaaggcgatccgggcgcgattggcgcgccgggcaaaaccggcccggtgggcccggcgggcccggcgggcaaaccgggcccggatggcctgcgcggcctgccgggcagcgtgggccagcagggccgcccgggcgcgaccggccaggcgggcccgccgggcccggtgggcccgccgggcctgccgggcctgcgcggcgatgcgggcgcgaaaggcgaaaaaggccatccgggcctgattggcctgattggcccgccgggcgaacagggcgaaaaaggcgatcgcggcctgccgggcccgcagggcagcccgggccagaaaggcgaaatgggcattccgggcgcgagcggcccgattggcccgggcggcccgccgggcctgccgggcccggcgggcccgaaaggcgcgaaaggcgcgaccggcccgggcggcccgaaaggcgaaaaaggcgtgcagggcccgccgggccatccgggcccgccgggcgaagtg

SEQ ID NO: 1034 - DNA, 456 bp, Homo sapiens
ggcccgccgggcccgccgggcccggcgggcggcccgggcgcgaaaggcccgcgcggcgaacgcggcattagcggcgcgattggcccgccgggcccgcgcggcgatattggcccgccgggcccgcagggcccgccgggcccgcagggcccgaacggcctgagcattccgggcgaacagggccgccagggcatgaaaggcgatgcgggcgaaccgggcctgccgggccgcaccggcaccccgggcctgccgggcccgccgggcccgatgggcccgccgggcgatcgcggctttaccggcaaagatggcgcgatgggcccgcgcggcccgccgggcccgccgggcagcccgggcagcccgggcgtgaccggcccgagcggcaaaccgggcaaaccgggcgatcatggccgcccgggcccgagcggcctgaaaggcgaaaaaggcgatcgcggcgatatt

SEQ ID NO: 1035 - DNA, 309 bp, Homo sapiens
ggcccgccgggcccgccgggcccgccgggcagcgcgggcgcgcgcggcgaaccgggcccgggcggccgcccgggctttccgggcaccccgggcatgcagggcccgccgggcgaacgcggcctgccgggcgaaaaaggcgaacgcggcaccggcagcagcggcccgcgcggcctgccgggcccgccgggcccgcagggcgaaagccgcaccggcccgccgggcagcaccggcagccgcggcccgccgggcccgccgggccgcccgggcaacagcggcattcgcggcccgccgggcccgccgggctattgc

SEQ ID NO: 1036 - DNA, 285 bp, Homo sapiens
ggcccgccgggcccgaccggccgcccgggcctgccgggcgataaaggcgcgattggcatgccgggccgcgtgggcagcccgggcgatgcgggcctgagcattattggcccgcgcggcccgccgggccagccgggcacccgcggctttccgggctttccgggcccgattggcctggatggcaaaccgggccatccgggcccgaaaggcgatatgggcctgaccggcccgccgggccagccgggcccgcagggccagaaaggcgaaaaaggccagtgcggcgaatat

SEQ ID NO: 1037 - DNA, 516 bp, Homo sapiens
ggcccgccgggcccgccgggcccgccgggcccgagcggcccgctgggccatccgggcctgccgggcccgatgggcccgccgggcctgccgggcccgccgggcccgaaaggcgatccgggcattcagggctatcatggccgcaaaggcgaacgcggcatgccgggcatgccgggcaaacatggcgcgaaaggcgcgccgggcattgcggtggcgggcatgaaaggcgaaccgggcattccgggcaccaaaggcgaaaaaggcgcggaaggcagcccgggcctgccgggcctgctgggccagaaaggcgaaaaaggcgatgcgggcaacagcattggcggcggccgcggcgaaccgggcccgccgggcctgccgggcccgccgggcccgaaaggcgaagcgggcgtggatggccaggtgggcccgccgggccagccgggcgataaaggcgaacgcggcgcggcgggcgaacagggcccggatggcccgaaaggcagcaaaggcgaaccgggcaaaggc

SEQ ID NO: 1038 - DNA, 708 bp, Homo sapiens
ggcccgccgggcctgccgggccagattggcccgccgggcgcgccgggcattccgggccagaaaggcgaaattggcctgccgggcccgccgggccatgatggcgaaaaaggcccgcgcggcaaaccgggcgatatgggcccgccgggcccgcagggcccgccgggcaaagatggcccgccgggcgtgaaaggcgaaaacggccatccgggcagcccgggcgaaaaaggcgaaaaaggcgaaaccggccaggcgggcagcccgggcgaaaaaggcgaagcgggcgaaaaaggcaacccgggcgcggaagtgccgggcctgccgggcccggaaggcccgccgggcccgccgggcctgcagggcgtgccgggcccgaaaggcgaagcgggcctggatggcgcgaaaggcgaaaaaggctttcagggcgaaaaaggcgatcgcggcccgctgggcctgccgggcgcgagcggcctggatggccgcccgggcccgccgggcaccccgggcccgattggcgtgccgggcccggcgggcccgaaaggcgaacgcggcagcaaaggcgatccgggcatgaccggcccgaccggcgcggcgggcctgccgggcctgcatggcccgccgggcgataaaggcaaccgcggcgaacgcggcaaaaaaggcagccgcggcccgaaaggcgataaaggcgatcagggcgcgccgggcctggat

SEQ ID NO: 1039 - DNA, 456 bp, Homo sapiens
gtggcgctgggcccggcgggcccgccgggcggcccgggcctgcgcggcccgaaaggccagcagggcgaaccgggcccgaaaggcccggatggcccgcgcggcgaaattggcctgccgggcccgcagggcccgccgggcccgcagggcccgagcggcctgagcattcagggcatgccgggcatgccgggcgaaaaaggcgaaaaaggcgataccggcctgccgggcccgcagggcattccgggcggcgtgggcagcccgggccgcgatggcagcccgggccagcgcggcctgccgggcaaagatggcagcagcggcccgccgggcccgccgggcccgattggcattccgggcaccccgggcgtgccgggcattaccggcagcatgggcccgcagggcgcgctgggcccgccgggcgtgccgggcgcgaaaggcgaacgcggcgaacgcggcgatctg

SEQ ID NO: 1040 - DNA, 378 bp, Homo sapiens
ggcccgccgggcgaaccgggccgcccgggcagcccgggcgcgccgggcgaacagggcccgccgggcaccccgggctttccgggcaacgcgggcgtgccgggcaccccgggcgaacgcggcctgaccggcattaaaggcgaaaaaggcaacccgggcgtgggcacccagggcccgcgcggcccgccgggcccggcgggcccgagcggcgaaagccgcccgggcagcccgggcccgccgggcagcccgggcccgcgcggcccgccgggccatctgggcgtgccgggcccgcagggcccgagcggccagccgggctattgcgatccgagcagctgcagcgcgtatggcgtgcgcgcgccgcatccggatcagccggaattt

SEQ ID NO: 1041 - DNA, 1542 bp, Homo sapiens
ggcccgccgggcccgccgggcccgccgggcctgccgggcattccgggcaaaccgggcaccgatgtgtttatgggcccgccgggcagcccgggcgaagatggcccggcgggcgaaccgggcccgccgggcccggaaggccagccgggcgtggatggcgcgaccggcctgccgggcatgaaaggcgaaaaaggcgcgcgcggcccgaacggcagcgtgggcgaaaaaggcgatccgggcaaccgcggcctgccgggcccgccgggcaaaaaaggccaggcgggcccgccgggcgtgatgggcccgccgggcccgccgggcccgccgggcccgccgggcccgggctgcaccatgggcctgggctttgaagataccgaaggcagcggcagcacccagctgctgaacgaaccgaaactgagccgcccgaccgcggcgattggcctgaaaggcgaaaaaggcgatcgcggcccgaaaggcgaacgcggcatggatggcgcgagcattgtgggcccgccgggcccgcgcggcccgccgggccatattaaagtgctgagcaacagcctgattaacattacccatggctttatgaactttagcgatattccggaactggtgggcccgccgggcccggatggcctgccgggcctgccgggctttccgggcccgcgcggcccgaaaggcgataccggcctgccgggctttccgggcctgaaaggcgaacagggcgaaaaaggcgaaccgggcgcgattctgaccgaagatattccgctggaacgcctgatgggcaaaaaaggcgaaccgggcatgcatggcgcgccgggcccgatgggcccgaaaggcccgccgggccataaaggcgaatttggcctgccgggccgcccgggccgcccgggcctgaacggcctgaaaggcaccaaaggcgatccgggcgtgattatgcagggcccgccgggcctgccgggcccgccgggcccgccgggcccgccgggcgcggtgattaacattaaaggcgcgatttttccgattccggtgcgcccgcattgcaaaatgccggtggataccgcgcatccgggcagcccggaactgattacctttcatggcgtgaaaggcgaaaaaggcagctggggcctgccgggcagcaaaggcgaaaaaggcgatcagggcgcgcagggcccgccgggcccgccgctggatctggcgtatctgcgccattttctgaacaacctgaaaggcgaaaacggcgataaaggctttaaaggcgaaaaaggcgaaaaaggcgatattaacggcagctttctgatgagcggcccgccgggcctgccgggcaacccgggcccggcgggccagaaaggcgaaaccgtggtgggcccgcagggcccgccgggcgcgccgggcctgccgggcccgccgggctttggccgcccgggcgatccgggcccgccgggcccgccgggcccgccgggcccgccggcgattctgggcgcggcggtggcgctgccgggcccgccgggcccgccgggccagccgggcctgccgggcagccgc

SEQ ID NO: 1042 - DNA, 3612 bp, Homo sapiens
ggcccgaaaggcgaaaaaggcgaaagcggcgcgctgggcccgagcggcctgccgggcagcaccggcgaaaaaggccagaaaggcgaaaaaggcgatggcggcattaaaggcgtgccgggcaaaccgggccgcgatggccgcccgggcgaaatttgcgtgattggcccgaaaggccagaaaggcgatccgggctttgtgggcccggaaggcctggcgggcgaaccgggcccgccgggcctgccgggcccgccgggcattggcctgccgggcaccccgggcgatccgggcggcccgccgggcccgaaaggcgataaaggcagcagcggcattccgggcaaagaaggcccgggcggcaaaccgggcaaaccgggcgtgaaaggcgaaaaaggcgatccgtgcgaagtgtgcccgaccctgccggaaggctttcagaactttgtgggcctgccgggcaaaccgggcccgaaaggcgaaccgggcgatccggtgccggcgcgcggcgatccgggcattcagggcattaaaggcgaaaaaggcgaaccgtgcctgagctgcagcagcgtggtgggcgcgcagcatctggtgagcagcaccggcgcgagcggcgatgtgggcagcccgggctttggcctgccgggcctgccgggccgcgcgggcgtgccgggcctgaaaggcgaaaaaggcaactttggcgaagcgggcccggcgggcagcccgggcccgccgggcccggtgggcccggcgggcattaaaggcgcgaaaggcgaaccgtgcgaaccgtgcccggcgctgagcaacctgcaggatggcgatgtgcgcgtggtggcgctgccgggcccgagcggcgaaaaaggcgaaccgggcccgccgggctttggcctgccgggcaaacagggcaaagcgggcgaacgcggcctgaaaggccagaaaggcgatgcgggcaacccgggcgatccgggcaccccgggcaccaccggccgcccgggcctgagcggcgaaccgggcgtgcagggcccggcgggcccgaaaggcgaaaaaggcgatggctgcaccgcgtgcccgagcctgcagggcaccgtgaccgatatggcgggccgcccgggccagccgggcccgaaaggcgaacagggcccggaaggcgtgggccgcccgggcaaaccgggccagccgggcctgccgggcgtgcagggcccgccgggcctgaaaggcgtgcagggcgaaccgggcccgccgggccgcggcgtgcagggcccgcagggcgaaccgggcgcgccgggcctgccgggcattcagggcctgccgggcccgcgcggcccgccgggcccgaccggcgaaaaaggcgcgcagggcagcccgggcgtgaaaggcgcgaccggcccggtgggcccgccgggcgcgagcgtgagcggcccgccgggccgcgatggccagcagggccagaccggcctgcgcggcaccccgggcgaaaaaggcccgcgcggcgaaaaaggcgaaccgggcgaatgcagctgcccgagccagggcgatctgatttttagcggcatgccgggcgcgccgggcctgtggatgggcagcagctggcagccgggcccgcagggcccgccgggcattccgggcccgccgggcccgccgggcgtgccgggcctgcagggcgtgccgggcaacaacggcctgccgggccagccgggcctgaccgcggaactgggcagcctgccgattgaacagcatctgctgaaaagcatttgcggcgattgcgtgcagggccagcgcgcgcatccgggctatctggtggaaaaaggcgaaaaaggcgatcagggcattccgggcgtgccgggcctggataactgcgcgcagtgctttctgagcctggaacgcccgcgcgcggaagaagcgcgcggcgataacagcgaaggcgatccgggctgcgtgggcagcccgggcctgccgggcccgccgggcctgccgggccagcgcggcgaagaaggcccgccgggcatgcgcggcagcccgggcccgccgggcccgattggcccgccgggctttccgggcgcggtgggcagcccgggcctgccgggcctgcagggcgaacgcggcctgaccggcctgaccggcgataaaggcgaaccgggcccgccgggccagccgggctatccgggcgcgaccggcccgccgggcctgccgggcattaaaggcgaacgcggctataccggcagcgcgggcgaaaaaggcgaaccgggcccgccgggcagcgaaggcctgccgggcccgccgggcccggcgggcccgcgcggcgaacgcggcccgcagggcaacagcggcgaaaaaggcgatcagggctttcagggccagccgggctttccgggcccgccgggcccgccgggctttccgggcaaagtgggcagcccgggcccgccgggcccgcaggcggaaaaaggcagcgaaggcattcgcggcccgagcggcctgccgggcagcccgggcccgccgggcccgccgggcattcagggcccggcgggcctggatggcctggatggcaaagatggcaaaccgggcctgcgcggcgatccgggcccggcgggcccgccgggcctgatgggcccgccgggctttaaaggcaaaaccggccatccgggcctgccgggcccgaaaggcgattgcggcaaaccgggcccgccgggcagcaccggccgcccgggcgcggaaggcgaaccgggcgcgatgggcccgcagggccgcccgggcccgccgggccatgtgggcccgccgggcccgccgggccagccgggcccggcgggcattagcgcggtgggcctgaaaggcgatcgcggcgcgaccggcgaacgcggcctggcgggcctgccgggccagccgggcccgccgggccatccgggcccgccgggcgaaccgggcaccgatggcgcggcgggcaaagaaggcccgccgggcaaacagggcttttatggcccgccgggcccgaaaggcgatccgggcgcggcgggccagaaaggccaggcgggcgaaaaaggccgcgcgggcatgccgggcggcccgggcaaaagcggcagcatgggcccggtgggcccgccgggcccggcgggcgaacgcggccatccgggcgcgccgggcccgagcggcagcccgggcctgccgggcgtgccgggcagcatgggcgatatggtgaactatgatgaaattaaacgctttattcgccaggaaattattaaaatgtttgatgaacgcatggcgtattataccagccgcatgcagtttccgatggaaatggcggcggcgccgggccgcccgggcccgccgggcaaagatggcgcgccgggccgcccgggcgcgccgggcagcccgggcctgccgggccagattggccgcgaaggccgccagggcctgccgggcgtgcgcggcctgccgggcaccaaaggcgaaaaaggcgatattggcattggcattgcgggcgaaaacggcctgccgggcccgccgggcccgcagggcccgccgggctatggcaaaatgggcgcgaccggcccgatgggccagcagggcattccgggcattccgggcccgccgggcccgatgggccagccgggcaaagcgggccattgc

SEQ ID NO: 1043 - DNA, 2748 bp, Homo sapiens
ggcagcccgggcccgaaaggcgatatgggcagcccgggcccgaaaggcgatcgcggctttccgggcaccccgggcattccgggcccgctgggccatccgggcccgcagggcccgaaaggccagaaaggcagcgtgggcgatccgggcatggaaggcccgatgggccagcgcggccgcgaaggcccgatgggcccgcgcggcgaagcgggcccgccgggcagcggcgaaaaaggcgaacgcggcgcggcgggcgaaccgggcccgcatggcccgccgggcgtgccgggcagcgtgggcccgaaaggcagcagcggcagcccgggcccgcagggcccgccgggcccggtgggcctgcagggcctgcgcggcgaagtgggcctgccgggcgtgaaaggcgataaaggcccgatgggcccgccgggcccgaaaggcgatcagggcgaaaaaggcccgcgcggcctgaccggcgaaccgggcatgcgcggcctgccgggcgcggtgggcgaaccgggcgcgaaaggcgcgatgggcccggcgggcccggatggccatcagggcccgcgcggcgaacagggcctgaccggcatgccgggcattcgcggcccgccgggcccgagcggcgatccgggcaaaccgggcctgaccggcccgcagggcccgcagggcctgccgggcaccccgggccgcccgggcattaaaggcgaaccgggcgcgccgggcaaaattgtgaccagcgaaggcagcagcatgctgaccgtgccgggcccgccgggcccgccgggcgcgatgggcccgccgggcccgccgggcgcgccgggcccggcgggcccggcgggcctgccgggccatcaggaagtgctgaacctgcagggcccgccgggcccgccgggcccgcgcggcccgccgggcccgagcattccgggcccgccgggcccgcgcggcccgccgggcgaaggcctgccgggcccgccgggcccgccgggcagctttctgagcaacagcgaaacctttctgagcggcccgccgggcccgccgggcccgccgggcccgaaaggcgatcagggcccgccgggcccgcgcggccatcagggcgaacagggcctgccgggctttagcaccagcggcagcagcagctttggcctgaacctgcagggcccgccgggcccgccgggcccgcagggcccgaaaggcgataaaggcgatccgggcgtgccgggcgcgctgggcattccgagcggcccgagcgaaggcggcagcagcagcaccatgtatgtgagcggcccgccgggcccgccgggcccgccgggcccgccgggcagcattagcagcagcggccaggaaattcagcagtatattagcgaatatatgcagagcgatagcattcgcagctatctgagcggcgtgcagggcccgccgggcccgccgggcccgccgggcccggtgaccaccattaccggcgaaacctttgattatagcgaactggcgagccatgtggtgagctatctgcgcaccagcggctatggcgtgagcctgtttagcagcagcattagcagcgaagatattctggcggtgctgcagcgcgatgatgtgcgccagtatctgcgccagtatctgatgggcccgcgcggcccgccgggcccgccgggcgcgagcggcgatggcagcctgctgagcctggattatgcggaactgagcagccgcattctgagctatatgagcagcagcggcattagcattggcctgccgggcccgccgggcccgccgggcctgccgggcaccagctatgaagaactgctgagcctgctgcgcggcagcgaatttcgcggcattgtgggcccgccgggcccgccgggcccgccgggcattccgggcaacgtgtggagcagcattagcgtggaagatctgagcagctatctgcataccgcgggcctgagctttattccgggcccgccgggcccgccgggcccgccgggcccgcgcggcccgccgggcgtgagcggcgcgctggcgacctatgcggcggaaaacagcgatagctttcgcagcgaactgattagctatctgaccagcccggatgtgcgcagctttattgtgggcccgccgggcccgccgggcccgcagggcccgccgggcgatagccgcctgctgagcaccgatgcgagccatagccgcggcagcagcagcagcagccatagcagcagcgtgcgccgcggcagcagctatagcagcagcatgagcaccggcggcggcggcgcgggcagcctgggcgcgggcggcgcgtttggcgaagcggcgggcgatcgcggcccgtatggcaccgatattggcccgggcggcggctatggcgcggcggcggaaggcggcatgtatgcgggcaacggcggcctgctgggcgcggattttgcgggcgatctggattataacgaactggcggtgcgcgtgagcgaaagcatgcagcgccagggcctgctgcagggcatggcgtataccgtgcagggcccgccgggccagccgggcccgcagggcccgccgggcattagcaaagtgtttagcgcgtatagcaacgtgaccgcggatctgatggatttttttcagacctatggcgcgattcagggcccgccgggccagaaaggcgaaatgggcaccccgggcccgaaaggcgatcgcggcccggcgggcccgccgggccatccgggcccgccgggcccgcgcggccataaaggcgaaaaaggcgataaaggcgatcag

SEQ ID NO: 1044 - DNA, 2073 bp, Homo sapiens
ggcctgaaaggccagaaaggcgaaccgggcgtgccgggcccgccgggccgcgcgggcccgccgggcagcccgtgcctgccgggcccgccgggcctgccgtgcccggtgagcccgctgggcccggcgggcccggcgctgcagaccgtgccgggcccgcagggcccgccgggcccgccgggccgcgatggcaccccgggccgcgatggcgaaccgggcgatccgggcgaagatggcaaaccgggcgataccggcccgcagggctttccgggcaccccgggcgatgtgggcccgaaaggcgataaaggcgatccgggcgtgggcgaacgcggcccgccgggcccgcagggcccgccgggcccgccgggcccgagctttcgccatgataaactgacctttattgatatggaaggcagcggctttggcggcgatctggaagcgctgcgcggcccgcgcggctttccgggcccgccgggcccgccgggcgtgccgggcctgccgggcgaaccgggccgctttggcgtgaacagcagcgatgtgccgggcccggcgggcctgccgggcgtgccgggccgcgaaggcccgccgggctttccgggcctgccgggcccgccgggcccgccgggccgcgaaggcccgccgggccgcaccggccagaaaggcagcctgggcgaagcgggcgcgccgggccataaaggcagcaaaggcgcgccgggcccggcgggcgcgcgcggcgaaagcggcctggcgggcgcgccgggcccggcgggcccgccgggcccgccgggcccgccgggcccgccgggcccgggcctgccggcgggctttgatgatatggaaggcagcggcggcccgttttggagcaccgcgcgcagcgcggatggcccgcagggcccgccgggcctgccgggcctgaaaggcgatccgggcgtgccgggcctgccgggcgcgaaaggcgaagtgggcgcggatggcgtgccgggctttccgggcctgccgggccgcgaaggcattgcgggcccgcagggcccgaaaggcgatcgcggcagccgcggcgaaaaaggcgatccgggcaaagatggcgtgggccagccgggcctgccgggcccgccgggcccgccgggcccggtggtgtatgtgagcgaacaggatggcagcgtgctgagcgtgccgggcccggaaggccgcccgggctttgcgggctttccgggcccggcgggcccgaaaggcaacctgggcagcaaaggcgaacgcggcagcccgggcccgaaaggcgaaaaaggcgaaccgggcagcatttttagcccggatggcggcgcgctgggcccggcgcagaaaggcgcgaaaggcgaaccgggctttcgcggcccgccgggcccgtatggccgcccgggctataaaggcgaaattggctttccgggccgcccgggccgcccgggcatgaacggcctgaaaggcgaaaaaggcgaaccgggcgatgcgagcctgggctttggcatgcgcggcatgccgggcccgccgggcccgccgggcccgccgggcccgccgggcaccccggtgtatgatagcaacgtgtttgcggaaagcagccgcccgggcccgccgggcctgccgggcaaccagggcccgccgggcccgaaaggcgcgaaaggcgaagtgggcccgccgggcccgccgggccagtttccgtttgattttctgcagctggaagcggaaatgaaaggcgaaaaaggcgatcgcggcgatgcgggccagaaaggcgaacgcggcgaaccgggcggcggcggcttttttggcagcagcctgccgggcccgccgggcccgccgggcccgccgggcccgcgcggctatccgggcattccgggcccgaaaggcgaaagcattcgcggccagccgggcccgccgggcccgcagggcccgccgggcattggctatgaaggccgccagggcccgccgggcccgccgggcccgccgggcccgccgagctttccgggcccgcatcgccagaccattagcgtgccgggcccgccgggcccgccgggcccgccgggcccgccgggcaccatgggcgcgagc

SEQ ID NO: 1045 - DNA, 2460 bp, Homo sapiens
ggcgaagcgggcctgccgggcgcgccgggcagcccgggccagaaaggccataaaggcgaaccgggcgaaaacggcctgcatggcgcgccgggctttccgggccagaaaggcgaacagggctttgaaggcagcaaaggcgaaaccggcgaaaaaggcgaacagggcgaaaaaggcgatccggcgctggcgggcctgaacggcgaaaacggcctgaaaggcgatctgggcccgcatggcccgccgggcccgaaaggcgaaaaaggcgataccggcccgccgggcccgccggcgctgccgggcagcctgggcattcagggcccgcagggcccgccgggcaaagaaggccagcgcggccgccgcggcaaaaccggcccgccgggcaaaccgggcccgccgggcccgccgggcccgccgggcattcagggcattcatcagaccctgggcggctattataacaaagataacaaaggcaacgatgaacatgaagcgggcggcctgaaaggcgataaaggcgaaaccggcctgccgggctttccgggcagcgtgggcccgaaaggccagaaaggcgaaccgggcgaaccgtttaccaaaggcgaaaaaggcgatcgcggcgaaccgggcgtgattggcagccagggcgtgaaaggcgaaccgggcgatccgggcccgccgggcctgattggcagcccgggcctgaaaggccagcagggcagcgcgggcagcatgggcccgcgcggcccgccgggcgatgtgggcctgccgggcgaacatggcattccgggcaaacagggcattaaaggcgaaaaaggcgatccgggcggcattattggcccgccgggcctgccgggcccgaaaggcgaagcgggcccgccgggcaaaagcctgccgggcgaaccgggcctggatggcaacccgggcgcgccgggcccgcgcggcccgaaaggcgaacgcggcctgccgggcgtgcatggcagcccgggcgatattggcccgcagggcattggcattccgggccgcaccggcgcgcagggcccggcgggcgaaccgggcattcagggcccgcgcggcctgccgggcctgccgggcaccccgggcaccccgggcaacgatggcgtgccgggccgcgatggcaaaccgggcctgccgggcccgccgggcgatccgattgcgctgccgctgctgggcgatattggcgcgctgctgaaaaacttttgcggcaactgccaggcgagcgtgccgggcctgaaaagcaacaaaggcgaagaaggcggcgcgggcgaaccgggcaaatatgatagcatggcgcgcaaaggcgatattggcccgcgcggcccgccgggcattccgggccgcgaaggcccgaaaggcagcaaaggcgaacgcggctatccgggcattccgggcgaaaaaggcgatgaaggcctgcagggcattccgggcattccgggcgcgccgggcccgaccggcccgccgggcctgatgggccgcaccggccatccgggcccgaccggcgcgaaaggcgaaaaaggcagcgatggcccgccgggcaaaccgggcccgccgggcccgccgggcattccgtttaacgaacgcaacggcatgagcagcctgtataaaattaaaggcggcgtgaacgtgccgagctatccgggcccgccgggcccgccgggcccgaaaggcgatccgggcccggtgggcgaaccgggcgcgatgggcctgccgggcctggaaggctttccgggcgtgaaaggcgatcgcggcccggcgggcccgccgggcattgcgggcatgagcggcaaaccgggcgcgccgggcccgccgggcgtgccgggcgaaccgggcgaacgcggcccggtgggcgatattggctttccgggcccggaaggcccgagcggcaaaccgggcattaacggcaaagatggcattccgggcgcgcagggcattatgggcaaaccgggcgatcgcggcccgaaaggcgaacgcggcgatcagggcattccgggcgatcgcggcagccagggcgaacgcggcaaaccgggcctgaccggcatgaaaggcgcgattggcccgatgggcccgccgggcaacaaaggcagcatgggcagcccgggccatcagggcccgccgggcagcccgggcattccgggcattccggcggatgcggtgagctttgaagaaattaaaaaatatattaaccaggaagtgctgcgcatttttgaagaacgcatggcggtgtttctgagccagctgaaactgccggcggcgatgctggcggcgcaggcgtatggccgcccgggcccgccgggcaaagatggcctgccgggcccgccgggcgatccgggcccgcagggctatcgcggccagaaaggcgaacgcggcgaaccgggcattggcctgccgggcagcccgggcctgccgggcaccagcgcgctgggcctgccgggcagcccgggcgcgccg

SEQ ID NO: 1046 - DNA, 360 bp, Homo sapiens
ggcccgccgggcccgcagggcccgccgggcctgccgggccgcaacggcaccccgggcgaacagggctttccgggcccgcgcggcccgccgggcgtgaaaggcgaaaaaggcgatcatggcctgccgggcctgcagggccatccgggccatcagggcattccgggccgcgtgggcctgcagggcccgaaaggcatgcgcggcctggaaggcaccgcgggcctgccgggcccgccgggcccgcgcggctttcagggcatggcgggcgcgcgcggcaccagcggcgaacgcggcccgccgggcaccgtgggcccgaccggcctgccgggcccgaaaggcgaacgcggcgaaaaaggcgaaccg

SEQ ID NO: 1047 - DNA, 1302 bp, Homo sapiens
ggcaaaccgggcctgcagggcccgaaaggcgatccgggcctgccgggcaacccgggctatccgggccagccgggccaggatggcaaaccgggctatcagggcattgcgggcaccccgggcgtgccgggcagcccgggcattcagggcgcgcgcggcctgccgggctataaaggcgaaccgggccgcgatggcgataaaggcgatcgcggcctgccgggctttccgggcctgcatggcatgccgggcagcaaaggcgaaatgggcgcgaaaggcgataaaggcagcccgggcttttatggcaaaaaaggcgcgaaaggcgaaaaaggcaacgcgggctttccgggcctgccgggcccggcgggcgaaccgggccgccatggcaaagatggcctgatgggcagcccgggctttaaaggcgaagcgggcagcccgggcgcgccgggccaggatggcacccgcggcgaaccgggcattccgggctttccgggcaaccgcggcctgatgggccagaaaggcgaaattggcccgccgggccagcagggcaaaaaaggcgcgccgggcatgccgggcctgatgggcagcaacggcagcccgggccagccgggcaccccgggcagcaaaggcagcaaaggcgaaccgggcattcagggcatgccgggcgcgagcggcctgaaaggcgaaccgggcgcgaccggcagcccgggcgaaccgggctatatgggcctgccgggcattcagggcaaaaaaggcgataaaggcaaccagggcgaaaaaggcattcagggccagaaaggcgaaaacggccgccagggcattccgggccagcagggcattcagggccatcatggcgcgaaaggcgaacgcggcgaaaaaggcgaaccgggcgtgcgcggcgcgattggcagcaaaggcgaaagcggcgtggatggcctgatgggcccggcgggcccgaaaggccagccgggcgatccgggcccgcagggcccgccgggcctggatggcaaaccgggccgcgaatttagcgaacagtttattcgccaggtgtgcaccgatgtgattcgcgcgcagctgccggtgctgctgcagagcggccgcattcgcaactgcgatcattgcctgagccagcatggcagcccgggcattccgggcccgccgggcccgattggcccggaaggcccgcgcggcctgccgggcctgccgggccgcgatggcgtgccgggcctggtgggcgtgccgggccgcccgggcgtgcgcggcctgaaaggcctgccgggccgcaacggcgaaaaaggcagccagggc

SEQ ID NO: 1048 - DNA, 3375 bp, Homo sapiens
ggcgaaaaaggcgaaatgggcgtggcgggcccgatgggcctgccgggcccgaaaggcgatattggcgcgattggcccggtgggcgcgccgggcccgaaaggcgaaaaaggcgatgtgggcattggcccgtttggccagggcgaaaaaggcgaaaaaggcagcctgggcctgccgggcccgccgggccgcgatggcagcaaaggcatgcgcggcgaaccgggcgaactgggcgaaccgggcctgccgggcgaagtgggcatgcgcggcccgcagggcccgccgggcctgccgggcccgccgggccgcgtgggcgcgccgggcctgcagggcgaacgcggcgaaaaaggcacccgcggcgaaaaaggcgaacgcggcctggatggctttccgggcaaaccgggcgataccggccagcagggccgcccgggcccgagcggcgtggcgggcccgcagggcgaaaaaggcgatgtgggcccggcgggcccgccgggcgtgccgggcagcgtggtgcagcaggaaggcctgaaaggcgaacagggcgcgccgggcccgcgcggccatcagggcgcgccgggcccgccgggcgcgcgcggcccgattggcccggaaggccgcgatggcccgccgggcctgcagggcctgcgcggcaaaaaaggcgatatgggcccgccgggcattccgggcctgctgggcctgcagggcccgccgggcccgccgggcgtgccgggcccgccgggcccgggcggcagcccgggcctgccgggcgaaattggctttccgggcaaaccgggcccgccgggcccgaccggcccgccgggcaaagatggcccgaacggcccgccgggcccgccgggcaccaaaggcgaaccgggcgaacgcggcgaagatggcctgccgggcaaaccgggcctgcgcggcgaaattggcgaacagggcctggcgggccgcccgggcgaaaaaggcgaagcgggcctgccgggcgcgccgggctttccgggcgtgcgcggcgaaaaaggcgatcagggcgaaaaaggcgaactgggcctgccgggcctgaaaggcgatcgcggcgaaaaaggcgaagcgggcccggcgggcccgccgggcctgccgggcaccaccagcctgtttaccccgcatccgcgcatgccgggcgaacagggcccgaaaggcgaaaaaggcgatccgggcctgccgggcgaaccgggcctgcagggccgcccgggcgaactgggcccgcagggcccgaccggcccgccgggcgcgaaaggccaggaaggcgcgcatggcgcgccgggcgcggcgggcaacccgggcgcgccgggccatgtgggcgcgccgggcccgagcggcccgccgggcagcgtgggcgcgccgggcctgcgcggcaccccgggcaaagatggcgaacgcggcgaaaaaggcgcggcgggcgaagaaggcagcccgggcccggtgggcccgcgcggcgatccgggcgcgccgggcctgccgggcccgccgggcaaaggcaaagatggcgaaccgggcctgcgcggcagcccgggcctgccgggcccgctgggcaccaaagcggcgtgcggcaaagtgcgcggcagcgaaaactgcgcgctgggcggccagtgcgtgaaaggcgatcgcggcgcgccgggcattccgggcagcccgggcagccgcggcgatccgggcattggcgtggcgggcccgccgggcccgagcggcccgccgggcgataaaggcagcccgggcagccgcggcctgccgggctttccgggcccgcagggcccggcgggccgcgatggcgcgccgggcaacccgggcgaacgcggcccgccgggcaaaccgggcctgagcagcctgctgagcccgggcgatattaacctgctggcgaaagatgtgtgcaacgattgcccgccgggcccgccgggcctgccgggcctgccgggctttaaaggcgataaaggcgtgccgggcaaaccgggccgcgaaggcaccgaaggcaaaaaaggcgaagcgggcccgccgggcctgccgggcccgccgggcattgcgggcccgcagggcagccagggcgaacgcggcgcggatggcgaagtgggccagaaaggcgatcagggccatccgggcgtgccgggctttatgggcccgccgggcaacccgggcccgccgggcgcggatggcattgcgggcgcggcgggcccgccgggcattcagggcagcccgggcaaagaaggcccgccgggcccgcagggcccgagcggcctgccgggcattccgggcgaagaaggcaaagaaggccgcgatggcaaaccgggcccgccgggcgaaccgggcaaagcgggcgaaccgggcctgccgggcccggaaggcgcgcgcggcccgccgggctttaaaggccataccggcgatagcggcgcgccgggcccgcgcggcgaaagcggcgcgatgggcctgccgggccaggaaggcctgccgggcaaagatggcgataccggcccgaccggcccgcagggcccgcagggcccgcgcggcccgccgggcaaaaacggcagcccgggcagcccgggcgaaccgggcccgagcggcaccccgggccagaaaggcagcaaaggcgaaaacggcagcccgggcctgccgggctttctgggcccgcgcggcccgccgggcgaaccgggcgaaaaaggcgtgccgggcaaagaaggcgtgccgggcaaaccgggcgaaccgggctttaaaggcgaacgcggcgatccgggcattaaaggcgataaaggcccgccgggcggcaaaggccagccgggcgatccgggcattccgggccataaaggccataccggcctgatgggcccgcagggcctgccgggcgaaaacggcccggtgggcccgccgggcccgccgggccagccgggctttccgggcctgcgcggcgaaagcccgagcatggaaaccctgcgccgcctgattcaggaagaactgggcaaacagctggaaacccgcctggcgtatctgctggcgcagatgccgccggcgtatatgaaaagcagccagggccgcccgggcccgccgggcccgccgggcaaagatggcctgccgggccgcgcgggcccgatgggcgaaccgggccgcccgggccagggcggcctggaaggcccgagcggcccgattggcccgaaaggcgaacgcggcgcgaaaggcgatccgggcgcgccgggcgtgggcctgcgcggcgaaatgggcccgccgggcattccgggccagccgggcgaaccgggctatgcgaaagatggcctgccgggcattccgggcccgcagggcgaaaccggcccggcgggccatccgggcctgccgggcccgccgggcccgccgggccagtgc

SEQ ID NO: 1049 - DNA, 1197 bp, Homo sapiens
ggccgccgcggcaaaccgggccgccgcggcgatccgggcccgccgggccagagcggccgcgatggctatccgggcccgctgggcctggatggcaaaccgggcctgccgggcccgaaaggcgaaaaaggcgcgccgggcgattttggcccgcgcggcgatcagggccaggatggcgcggcgggcccgccgggcccgccgggcccgccgggcgcgcgcggcccgccgggcgataccggcaaagatggcccgcgcggcgcgcagggcccggcgggcccgaaaggcgaaccgggccaggatggcgaaatgggcccgaaaggcccgccgggcccgaaaggcgaaccgggcgtgccgggcaaaaaaggcgatgatggcaccccgagccagccgggcccgccgggcccgaaaggcgaaccgggcagcatgggcccgcgcggcgaaaacggcgtggatggcgcgccgggcccgaaaggcgaaccgggccatcgcggcaccgatggcgcggcgggcccgcgcggcgcgccgggcctgaaaggcgaacagggcgataccgtggtgattgattatgatggccgcattctggatgcgctgaaaggcccgccgggcccgcagggcccgccgggcccgccgggcattccgggcgcgaaaggcgaactgggcctgccgggcgcgccgggcattgatggcgaaaaaggcccgaaaggccagaaaggcgatccgggcgaaccgggcccggcgggcctgaaaggcgaagcgggcgaaatgggcctgagcggcctgccgggcgcggatggcctgaaaggcgaaaaaggcgaaagcgcgagcgatagcctgcaggaaagcctggcgcagctgattgtggaaccgggcccgccgggcccgccgggcccgccgggcccgatgggcctgcagggcattcagggcccgaaaggcctggatggcgcgaaaggcgaaaaaggcgcgagcggcgaacgcggcccgagcggcctgccgggcccggtgggcccgccgggcctgattggcctgccgggcaccaaaggcgaaaaaggccgcccgggcgaaccgggcctggatggctttccgggcccgcgcggcgaaaaaggcgatcgcagcgaacgcggcgaaaaaggcgaacgcggcgtgccgggccgcaaaggcgtgaaaggccagaaaggcgaaccgggcccgccgggcctggat

SEQ ID NO: 1050 - DNA, 2973 bp, Homo sapiens
ggcccgaaaggcgataccggcccgccgggcccgccgggcccggcgggcattccgggcccgagcggcaaacgcggcccgcgcggcattccgggcccgcatggcaacccgggcctgccgggcctgccgggcccgaaaggcccgaaaggcgatccgggctttagcccgggccagccggtgccgggcgaaaaaggcgatcagggcctgagcggcctgatgggcccgccgggcatgcagggcgataaaggcctgaaaggccatccgggcctgccgggcctgccgggcgaacagggcattccgggctttgcgggcaacattggcagcccgggctatccgggccgccagggcctggcgggcccggaaggcaacccgggcccgaaaggcgcgcagggctttattggcagcccgggcgaagcgggccagctgggcccggaaggcgaacgcggcattccgggcattcgcggcaaaaaaggctttaaaggccgccagggctttccgggcgattttggcgatcgcggcccggcgggcctggatggcagcccgggcctggtgggcggcaccggcccgccgggctttccgggcctgcgcggcagcgtgggcccggtgggcccgattggcccggcgggcattccgggcccgatgggcctgagcggcaacaaaggcctgccgggcattaaaggcgataaaggcgaacagggcaccgcgggcgaactgggcgaaccgggctatccgggcgataaaggcgcggtgggcctgccgggcccgccgggcatgcgcggcaaaagcggcccgagcggccagaccggcgatccgggcctgcagggcccgagcggcccgccgggcccggaaggctttccgggcgatattggcattccgggccagaacggcccggaaggcccgaaaggcctgctgggcaaccgcggcccgccgggcccgccgggcctgaaaggcacccagggcgaagaaggcccgattggcgcgtttggcgaactgggcccgcgcggcaaaccgggccagaaaggctatgcgggcgaaccgggcccggaaggcctgaaaggcgaagtgggcgatcagggcaacattggcaaaattggcgaaaccggcccggtgggcctgccgggcgaagtgggcatgaccggcagcattggcgaaaaaggcgaacgcggcagcccgggcccgctgggcccgcagggcgaaaaaggcgtgatgggctatccgggcccgccgggcgtgccgggcccgattggcccgctgggcctgccgggccatgtgggcgcgcgcggcccgccgggcagccagggcccgaaaggccagcgcggcagccgcggcccggatggcctgctgggcgaacagggcattcagggcgcgaaaggcgaaaaaggcgatcagggcaaacgcggcccgcatggcctgattggcaaaaccggcaacccgggcgaacgcggctttcagggcaaaccgggcctgcagggcctgccgggcagcaccggcgatcgcggcctgccgggcgaaccgggcctgcgcggcctgcagggcgatgtgggcccgccgggcgaaatgggcatggaaggcccgccgggcaccgaaggcgaaagcggcctgcagggcgaaccgggcgcgaaaggcgatgtgggcaccgcgggcagcgtgggcggcaccggcgaaccgggcctgcgcggcgaaccgggcgcgccgggcgaagaaggcctgcagggcaaagatggcctgaaaggcgtgccgggcggccgcggcctgccgggcgaagatggcgaaaaaggcgaaatgggcctgccgggcattattggcccgctgggccgcagcggccagaccggcctgccgggcccggaaggcattgtgggcattccgggccagcgcggccgcccgggcaaaaaaggcgataaaggccagattggcccgaccggcgaagtgggcagccgcggcccgccgggcaaaattggcaaaagcggcccgaaaggcgcgcgcggcacccgcggcgcggtgggccatctgggcctgatgggcccggatggcgaaccgggcattccgggctatcgcggccatcagggccagccgggcccgagcggcctgccgggcccgaaaggcgaaaaaggctatccgggcgaagatagcaccgtgctgggcccgccgggcccgcgcggcgaaccgggcccggtgggcgatcagggcgaacgcggcgaaccgggcgcggaaggctataaaggccatgtgggcgtgccgggcctgcgcggcgcgaccggccagcagggcccgccgggcgaaccgggcgatcagggcgaacagggcctgaaaggcgaacgcggcagcgaaggcaacaaaggcaaaaaaggcgcgccgggcccgagcggcaaaccgggcattccgggcctgcagggcctgctgggcccgaaaggcattcagggctatcatggcgcggatggcattagcggcaacccgggcaaaattggcccgccgggcaaacagggcctgccgggcattcgcggcggcccgggccgcaccggcctggcgggcgcgccgggcccgccgggcgtgaaaggcagcagcggcctgccgggcagcccgggcattcagggcccgaaaggcgaacagggcctgccgggccagccgggcattcagggcaaacgcggccatcgcggcgcgcagggcgatcagggcccgtgcggcgatccgggcctgaaaggccagccgggcgaatatggcgtgcagggcctgaccggctttcagggctttccgggcccgaaaggcccggaaggcgatgcgggcattgtgggcattagcggcccgaaaggcccgattggccatcgcggcaacaccggcccgctgggccgcgaaggcattattggcccgaccggccgcaccggcccgcgcggcgaaaaaggctttcgcggcgaaaccggcccgcagggcccgcgcggccagccgggcccgccgggcccgccgggcgcgccgggcccgcgc

SEQ ID NO: 1051 - DNA, 1524 bp, Homo sapiens
ggcccgccgggcaaacgcggcaaacgcggccgccgcggcgaaagcggcccgccgggccagccgggcccgcagggcccgccgggcccgaaaggcgataaaggcgaacagggcgatcagggcccgcgcatggtgtttccgaaaattaaccatggctttctgagcgcggatcagcagctgattaaacgccgcctgattaaaggcgatcagggccaggcgggcccgccgggcccgccgggcccgccgggcccgcgcggcccgccgggcgataccggcaaagatggcccgcgcggcatgccgggcgtgccgggcgaaccgggcaaaccgggcgaacagggcctgatgggcccgctgggcccgccgggccagaaaggcagcattggcgcgccgggcattccgggcatgaacggccagaaaggcgaaccgggcctgccgggcgcggtgggccagaacggcattccgggcccgaaaggcgaaccgggcgaacagggcgaaaaaggcgatgcgggcgaaaacggcccgaaaggcgataccggcgaaaaaggcgatccgggcagcagcgcggcgggcattaaaggcgaaccgggcgaaagcggccgcccgggccagaaaggcgaaccgggcctgccgggcctgccgggcctgccgggcattaaaggcgaaccgggctttattggcccgcagggcgaaccgggcctgccgggcctgccgggcaccaaaggcgaacgcggcgaagcgggcccgccgggccgcggcgaacgcggcgaaccgggcgcgccgggcccgaaaggcaaacagggcgaaagcggcacccgcggcccgaaaggcagcaaaggcgatcgcggcgaaaaaggcgatagcggcgcgcagggcccgcgcggcccgccgggccagaaaggcgatcagggcgcgaccgaaattattgattataacggcaacctgcatgaagcgctgcagcgcattaccaccctgaccgtgaccggcccgccgggcccgccgggcccgcagggcctgcagggcccgaaaggcgaacagggcagcccgggcattccgggcatggatggcgaacagggcctgaaaggcagcaaaggcgatatgggcgatccgggcatgaccggcgaaaaaggcggcattggcctgccgggcctgccgggcgcgaacggcatgaaaggcgaaaaaggcgatagcggcatgccgggcccgcagggcccgagcattattggcccgccgggcccgccgggcccgcatggcccgccgggcccgatgggcccgcatggcctgccgggcccgaaaggcaccgatggcccgatgggcccgcatggcccggcgggcccgaaaggcgaacgcggcgaaaaaggcgcgatgggcgaaccgggcccgcgcggcccgtatggcctgccgggcaaagatggcgaaccgggcctggatggctttccgggcccgcgcggcgaaaaaggcgatctgggcgaaaaaggcgaaaaaggctttcgcggcgtgaaaggcgaaaaaggcgaaccgggccagccg

SEQ ID NO: 1052 - DNA, 207 bp, Homo sapiens
ggcccggcgggcccgccgggccagaccggcccgccgggcccggcgggcccgccgggcagcaaaggcgatcgcggccagaccggcgaaaaaggcccggcgggcccgccgggcctgctgggcccgccgggcccgcgcggcctgccgggcgaaatgggccgcccgggcccgccgggcccgccgggcccggcgggcaacccgggcccgagc

SEQ ID NO: 1053 - DNA, 162 bp, Homo sapiens
ggcgtgccgggcccgcgcggcccgccgggcccgccgggcccgccgggcccgcgcggcccgccgggcccgccgggcaccccgggcagccagggcctggcgggcgaacgcggcaccgtgggcccgagcggcgaaccgggcgtgaaaggcgaagaaggcgaaaaa

SEQ ID NO: 1054 - DNA, 2982 bp, Homo sapiens
ggcccgccgggcccgaaaggcgattgcggcctgccgggcccgccgggcctgccgggcctgccgggcattccgggcgcgcgcggcccgcgcggcccgccgggcccgtatggcaacccgggcctgccgggcccgccgggcgcgaaaggccagaaaggcgatccgggcctgagcccgggcaaagcgcatgatggcgcgaaaggcgatatgggcctgccgggcctgagcggcaacccgggcccgccgggccgcaaaggccataaaggctatccgggcccggcgggccatccgggcgaacagggccagccgggcccggaaggcagcccgggcgcgaaaggctatccgggccgccagggcctgccgggcccggtgggcgatccgggcccgaaaggcagccgcggctatattggcctgccgggcctgtttggcctgccgggcagcgatggcgaacgcggcctgccgggcgtgccgggcaaacgcggcaaaatgggcatgccgggctttccgggcgtgtttggcgaacgcggcccgccgggcctggatggcaacccgggcgaactgggcctgccgggcccgccgggcgtgccgggcctgattggcgatctgggcgtgctgggcccgattggctatccgggcccgaaaggcatgaaaggcctgatgggcagcgtgggcgaaccgggcctgaaaggcgataaaggcgaacagggcgtgccgggcgtgagcggcgatccgggctttcagggcgataaaggcagccagggcctgccgggctttccgggcgcgcgcggcaaaccgggcccgctgggcaaagtgggcgataaaggcagcattggctttccgggcccgccgggcccggaaggctttccgggcgatattggcccgccgggcgataacggcccggaaggcatgaaaggcaaaccgggcgcgcgcggcctgccgggcccgcgcggccagctgggcccggaaggcgatgaaggcccgatgggcccgccgggcgcgccgggcctggaaggccagccgggccgcaaaggctttccgggccgcccgggcctggatggcgtgaaaggcgaaccgggcgatccgggccgcccgggcccggtgggcgaacagggctttatgggctttattggcctggtgggcgaaccgggcattgtgggcgaaaaaggcgatcgcggcatgatgggcccgccgggcgtgccgggcccgaaaggcagcatgggccatccgggcatgccgggcggcatgggcaccccgggcgaaccgggcccgcagggcccgccgggcagccgcggcccgccgggcatgcgcggcgcgaaaggccgccgcggcccgcgcggcccggatggcccggcgggcgaacagggcagccgcggcctgaaaggcccgccgggcccgcagggccgcccgggccgcccgggccagcagggcgtggcgggcgaacgcggccatctgggcagccgcggctttccgggcattccgggcccgagcggcccgccgggcaccaaaggcctgccgggcgaaccgggcccgcagggcccgcagggcccgattggcccgccgggcgaaatgggcccgaaaggcccgccgggcgcggtgggcgaaccgggcctgccgggcgaagcgggcatgaaaggcgatctgggcccgctgggcaccccgggcgaacagggcctgattggccagcgcggcgaaccgggcctggaaggcgatagcggcccgatgggcccggatggcctgaaaggcgatcgcggcgatccgggcccggatggcgaacatggcgaaaaaggccaggaaggcctgatgggcgaagatggcccgccgggcccgccgggcgtgaccggcgtgcgcggcccggaaggcaaaagcggcaaacagggcgaaaaaggccgcaccggcgcgaaaggcgcgaaaggctatcagggccagctgggcgaaatgggcgtgccgggcgatccgggcccgccgggcaccccgggcccgaaaggcagccgcggcagcctgggcccgaccggcgcgccgggccgcatgggcgcgcagggcgaaccgggcctggcgggctatgatggccataaaggcattgtgggcccgctgggcccgccgggcccgaaaggcgaaaaaggcgaacagggcgaagatggcaaagcggaaggcccgccgggcccgccgggcgatcgcggcccggtgggcgatcgcggcgatcgcggcgaaccgggcgatccgggctatccgggccaggaaggcgtgcagggcctgcgcggcaaaccgggccagcagggccagccgggccatccgggcccgcgcggctggccgggcccgaaaggcagcaaaggcgcggaaggcccgaaaggcaaacagggcaaagcgggcgcgccgggccgccgcggcgtgcagggcctgcagggcctgccgggcccgcgcggcgtggtgggccgccagggcctggaaggcattgcgggcccggatggcctgccgggccgcgatggccaggcgggccagcagggcgaacagggcgatgatggcgatccgggcccgatgggcccggcgggcaaacgcggcaacccgggcgtggcgggcctgccgggcgcgcagggcccgccgggctttaaaggcgaaagcggcctgccgggccagctgggcccgccgggcaaacgcggcaccgaaggccgcaccggcctgccgggcaaccagggcgaaccgggcagcaaaggccagccgggcgatagcggcgaaatgggctttccgggcatggcgggcctgtttggcccgaaaggcccgccgggcgatattggctttaaaggcattcagggcccgcgcggcccgccgggcctgatgggcaaagaaggcattgtgggcccgctgggcattctgggcccgagcggcctgccgggcccgaaaggcgataaaggcagccgcggcgattggggcctgcagggcccgcgcggcccgccgggcccgcgcggccgcccgggcccgccgggcccgccg

SEQ ID NO: 1055 - DNA, 1590 bp, Homo sapiens
ggcgatccgggcgatccgggcccgccgggcacccatggcaacccgggcattaaaggcgaacgcggcccgaaaggcaacccgggcaacgcgcagaaaggcgaagcgggcgaacgcggcccgggcggcattccgggctataaaggcgataaaggcgaacgcggcgaatgcggcaaaccgggcattaaaggcgataaaggcagcccgggcccgtatggcccgaaaggcccgcgcggcattcagggcattaccggcccgccgggcgatccgggcccgaaaggctttcagggcaacaaaggcgaaccgggcccgccgggcccgtatggcagcccgggcgcgccgggcattggccagcagggcattaaaggcgaacgcggccaggaaggccgcccgggcgcgccgggcccgattggcgtgggcgaaccgggccagccgggcccgcgcggcccggaaggcgtgccgggcgaacgcggcctgccgggcgaaggctttccgggcccgaaaggcgaaaaaggcagcgaaggcccgaccggcccgcagggcctgcagggcctgagcattaaaggcgaaaaaggcgatattggcccggtgggcccgcagggcccgatgggcattccgggcattggcagccagggcgaacagggcattcagggcccgattggcccgccgggcccgcagggcccggcgggccagggcctgccgggcagcaaaggcgaagtgggccagatgggcccgaccggcccgcgcggcccggtgggcattggcgtgcagggcccgaaaggcgaaccgggcagcattggcctgccgggccagccgggcgtgccgggcgaagatggcgcggcgggcaaaaaaggcgaagcgggcctgccgggcgcgcgcggcccggaaggcccgccgggcaaaggccagccgggcccgaaaggcgatgaaggcaaaaaaggcagcaaaggcaaccagggccagcgcggcctgccgggcccggaaggcccgaaaggcgaaccgggcattatgggcccgtttggcatgccgggcaccagcattccgggcccgccgggcccgaaaggcgatcgcggcggcccgggcattccgggctttaaaggcgaaccgggcctgagcattcgcggcccgaaaggcgtgcagggcccgcgcggcccggtgggcgcgccgggcctgaaaggcgatggctatccgggcgtgccgggcccgcgcggcctgccgggcccgccgggcccgatgggcctgcgcggcgtgggcgataccggcgcgaaaggcgaaccgggcgtgcgcggcccgccgggcccgagcggcccgcgcggcgtgggcacccagggcccgaaaggcgataccggccagaaaggcctgccgggcccgccgggcccgccgggctatggcagccagggcattaaaggcgaacagggcccgcagggctttccgggcccgaaaggcaccatgggccatggcctgccgggccagaaaggcgaacatggcgaacgcggcgatgtgggcaaaaaaggcgataaaggcgaaattggcgaaccgggcagcccgggcaaacagggcctgcagggcccgaaaggcgatctgggcctgacc

SEQ ID NO: 1056 - DNA, 237 bp, Homo sapiens
ggcaaaaaaggcgaagcgggccgcccgggccgccgcggccgcccgggcctgaaaggcgaacagggcgaaccgggcgcgccgggcattcgcaccggcattcagggcctgaaaggcgatcagggcgaaccgggcccgagcggcaacccgggcaaagtgggctatccgggcccgagcggcccgctgggcgcgcgcggcattccgggcattaaaggcaccaaaggcagcccgggcaacatt

SEQ ID NO: 1057 - DNA, 252 bp, Homo sapiens
ggcccgccggcgattccgggcattccgggcattccgggcaccccgggcccggatggccagccgggcaccccgggcattaaaggcgaaaaaggcctgccgggcctggcgggcgatcatggcgaatttggcgaaaaaggcgatccgggcattccgggcaacccgggcaaagtgggcccgaaaggcccgatgggcccgaaaggcggcccgggcgcgccgggcgcgccgggcccgaaaggcgaaagcggcgattat

SEQ ID NO: 1058 - DNA, 252 bp, Homo sapiens
ggctgctatggcattccgggcatgccgggcctgccgggcgcgccgggcaaagatggctatgatggcctgccgggcccgaaaggcgaaccgggcattccggcgattccgggcattcgcggcccgaaaggccagaaaggcgaaccgggcctgccgggccatccgggcaaaaacggcccgatgggcccgccgggcatgccgggcgtgccgggcccgatgggcattccgggcgaaccgggcgaagaaggccgctat

SEQ ID NO: 1059 - DNA, 153 bp, Homo sapiens
ggcccgcagggcaaaccgggccgcaccggcaaaccgggcccgccgggcccgccgggcgatccgggcccgccgggcccggtgggcccgccgggcgaaaaaggcgaaccgggcaaaccgggcccgccgggcctgccgggcgcgggcggcagcggc

SEQ ID NO: 1060 - DNA, 135 bp, Homo sapiens
ggcccgaaaggcgatccgggccgcccgggcaaaccgggcccgcgcggcccgccgggcgaaccgggcccgccgggcccgcgcggcccgccgggcgaaaaaggcgatagcggccgcccgggcctgccgggcctgcag

SEQ ID NO: 1061 - DNA, 153 bp, Homo sapiens
ggcccgaaaggcgaagcgggccgcccgggcaaagcgggcccgcgcggcccgccgggcgaaccgggcccgccgggcccgatgggcccgccgggcgaaaaaggcgaaccgggccgccagggcctgccgggcccgccgggcgcgccgggcctgaac

SEQ ID NO: 1062 - DNA, 141 bp, Homo sapiens
ggcgcgaaaggcgaagtgggccgccgcggcaaagcgggcctgcgcggcccgccgggcccgccgggcccgcgcggcccgccgggcgaaccgggccgcccgggcccgccgggcccgccgggcccgggcccgggcggcgtggcg

SEQ ID NO: 1063 - DNA, 126 bp, Homo sapiens
ggcgaaaaaggcgatcgcggcgatcgcggcctgcagggcaaatatggcaaaaccggcagcgcgggcgcgcgcggccataccggcccgaaaggccagaaaggcagcatgggcgcgccgggcgaacgc

SEQ ID NO: 1064 - DNA, 306 bp, Homo sapiens
ggcccgcagggcccgccgggcccgccgggcgcgccgggcccgagcggcatgatgggccgcatgggctttccgggcaaagatggccaggatggccatgatggcgatcgcggcgatagcggcgaagaaggcccgccgggccgcaccggcaaccgcggcaaaccgggcccgaaaggcaaagcgggcgcgattggccgcgcgggcccgcgcggcccgaaaggcgtgaacggcaccccgggcaaacatggcaccccgggcaaaaaaggcccgaaaggcaaaaaaggcgaaccgggcctgccgggcccgtgc

SEQ ID NO: 1065 - DNA, 189 bp, Homo sapiens
ggctatcagggcccgccgggcccgccgggcccgccgggcattccgggcaaccatggcaacaacggcaacaacggcgcgaccggccatgaaggcgcgaaaggcgaaaaaggcgataaaggcgatctgggcccgcgcggcgaacgcggccagcatggcccgaaaggcgaaaaaggctatccgggcattccg

SEQ ID NO: 1066 - DNA, 207 bp, Homo sapiens
ggccatccgggcctgccgggcaccccgggccatcatggcagccagggcctgccgggccgcgatggccgcgatggccgcgatggcgcgccgggcgcgccgggcgaaaaaggcgaaggcggccgcccgggcctgccgggcccgcgcggcgatccgggcccgcgcggcgaagcgggcccggcgggcccgaccggcccggcgggcgaatgc

SEQ ID NO: 1067 - DNA, 126 bp, Homo sapiens
ggcgataaaggcgatccgggcccgatgggcctgccgggctatatgggccgcgaaggcccgcagggcgaaccgggcccgcagggcagcaaaggcgataaaggcgaaatgggcagcccgggcgcgccg

SEQ ID NO: 1068 - DNA, 306 bp, Homo sapiens
ggcctgccgggcccgccgggcccgccgggcgcgaacggcagcccgggcccgcatggccgcattggcctgccgggccgcgatggccgcgatggccgcaaaggcgaaaaaggcgaaaaaggcaccgcgggcctgcgcggcaaaaccggcccgctgggcctggcgggcgaaaaaggcgatcagggcgaaaccggcaaaaaaggcccgattggcccggaaggcgaaaaaggcgaagtgggcccgattggcccgccgggcccgaaaggcgatcgcggcgaacagggcgatccgggcctgccgggcgtgtgc

SEQ ID NO: 1069 - DNA, 126 bp, Homo sapiens
ggcgaaaaaggcgaagcgggcgtgcgcggccgcgcgggccgcagcggcaaagaaggcccgccgggcgcgcgcggcctgcagggccgccgcggccagaaaggccaggtgggcccgccgggcgcggcg

SEQ ID NO: 1070 - DNA, 513 bp, Homo sapiens
ggccatccgggcattccgggcaacccgggccataacggcctgccgggccgcgatggccgcgatggcgcgaaaggcgataaaggcgatgcgggcgaaccgggccgcccgggcagcccgggcaaagatggcaccagcggcgaaaaaggcgaacgcggcgcggatggcaaagtggaagcgaaaggcattaaaggcgatcagggcagccgcggcagcccgggcaaacatggcccgaaaggcctggcgggcccgatgggcgaaaaaggcctgcgcggcgaaaccggcccgcagggccagaaaggcaacaaaggcgatgtgggcccgaccggcccggaaggcccgcgcggcaacattggcccgctgggcccgaccggcctgccgggcccgatgggcccgattggcaaaccgggcccgaaaggcgaagcgggcccgaccggcccgcagggcgaaccgggcgtgcgcggcattcgcggctggaaaggcgatcgcggcgaaaaaggcaaaattggcgaaacc

SEQ ID NO: 1071 - DNA, 513 bp, Homo sapiens
ggccatccgggcattccgggcaacccgggccataacggcctgccgggccgcgatggccgcgatggcgcgaaaggcgataaaggcgatgcgggcgaaccgggctgcccgggcagcccgggcaaagatggcaccagcggcgaaaaaggcgaacgcggcgcggatggcaaagtggaagcgaaaggcattaaaggcgatcagggcagccgcggcagcccgggcaaacatggcccgaaaggcctggcgggcccgatgggcgaaaaaggcctgcgcggcgaaaccggcccgcagggccagaaaggcaacaaaggcgatgtgggcccgaccggcccggaaggcccgcgcggcaacattggcccgctgggcccgaccggcctgccgggcccgatgggcccgattggcaaaccgggcccgaaaggcgaagcgggcccgaccggcccgcagggcgaaccgggcgtgcgcggcattcgcggctggaaaggcgatcgcggcgaaaaaggcaaaattggcgaaacc

SEQ ID NO: 1072 - DNA, 198 bp, Homo sapiens
ggcattccgggccatccgggccataacggcgcgccgggccgcgatggccgcgatggcaccccgggcgaaaaaggcgaaaaaggcgatccgggcctgattggcccgaaaggcgatattggcgaaaccggcgtgccgggcgcggaaggcccgcgcggctttccgggcattcagggccgcaaaggcgaaccgggcgaaggc

SEQ ID NO: 1073 - DNA, 666 bp, Homo sapiens
ggcgaaaccggccagccgggcccgaaaggcgaagcgggcaacctgggcattccgggcccgccgggcgtggtgggcccgcagggcccgcgcggctataaaggcgaaaaaggcctgaaaggcgaacgcggcgatcagggcgtgccgggctatccgggcaaaccgggcgcgcagggcgaaccgggcccgaaaggcgataaaggcaacattggcctgggcggcgtgaaaggccagaaaggcagcaaaggcgatacctgcggcaactgcaccaaaggcgaaaaaggcgatcagggcgcgatgggcagcccgggcctgcatggcggcccgggcgcgaaaggcgaaaaaggcgaaatgggcgaaaaaggcgaaatgggcgataaaggctgctgcggcgatagcggcgaacgcggcggcaaaggccagaaaggcgaaggcggcatgaaaggcgaaaaaggcagcaaaggcgatagcggcatggaaggcaaaagcggccgcaacggcctgccgggcgcgaaaggcgatccgggcattaaaggcgaaaaaggcgaactgggcccgccgggcctgctgggcccgaccggcccgaaaggcgatattggcaacaaaggcgtgcgcggcccgaccggcaaaaaaggcagccgcggctttaaaggcagcaaaggcgaactg

SEQ ID NO: 1074 - DNA, 153 bp, Homo sapiens
ggcccggcgggcgaagcgggcccgccgggcccgccgggcctgcagggcccgccgggcccggcgggcccgccgggcagcccgggcaaagatggccaggaaggcccgattggcccgccgggcccgcagggcgaacagggcgtggaaggcgcgccg

SEQ ID NO: 1075 - DNA, 570 bp, Homo sapiens
ggcccgccgccggcgcagggcagcccgggcgatggcggcctgcaggatcaggtgggcgcgtggggcctgccgggcccgaccggcccgaaaggcgatgcgggcagccgcggcccgatgggcatgcgcggcccgccgggcccgcagggcccgccgggcagcccgggccgcgcgggcgcggtgggcaccccgggcgaacgcggcccgccgggcccgccgggcccgccgggcccgccgggcccgccggcgccggtgggcccgccgcatgcgcgcattagccagcatggcgatccgctgctgagcaacacctttaccgaaaccaacaaccattggccgcagggcccgaccggcccgccgggcccgccgggcccgatgggcccgccgggcccgccgggcccgaccggcgtgccgggcagcccgggccatattggcccgccgggcccgaccggcccgaaaggcattagcggccatccgggcgaaaaaggcgaacgcggcctgcgcggcgaaccgggcccgcagggcagcgcgggccagcgcggcgaaccgggcccgaaaggcgatccgggcgaaaaa

SEQ ID NO: 1076 - DNA, 177 bp, Homo sapiens
ggcattaacggctttccgggcaaagatggccgcgatggcaccaaaggcgaaaaaggcgaaccgggccagggcctgcgcggcctgcagggcccgccgggcaaactgggcccgccgggcaacccgggcccgagcggcagcccgggcccgaaaggccagaaaggcgatccgggcaaaagc

SEQ ID NO: 1077 - DNA, 219 bp, Homo sapiens
ggcagcccgggcattccgggcaccccgggcagccatggcctgccgggccgcgatggccgcgatggcctgaaaggcgatccgggcccgccgggcccgatgggcccgccgggcgaaatgccgtgcccgccgggcaacgatggcctgccgggcgcgccgggcattccgggcgaatgcggcgaaaaaggcgaaccgggcgaacgcggcccgccgggcctgccg

SEQ ID NO: 1078 - DNA, 219 bp, Homo sapiens
ggcagcccgggcattccgggcaccccgggcagccatggcctgccgggccgcgatggccgcgatggcgtgaaaggcgatccgggcccgccgggcccgatgggcccgccgggcgaaaccccgtgcccgccgggcaacaacggcctgccgggcgcgccgggcgtgccgggcgaacgcggcgaaaaaggcgaagcgggcgaacgcggcccgccgggcctgccg

SEQ ID NO: 1079 - DNA, 531 bp, Homo sapiens
ggcctgccgggccgcgatggccgcgatggccgcgaaggcccgcgcggcgaaaaaggcgatccgggcctgccgggcgcggcgggccaggcgggcatgccgggccaggcgggcccggtgggcccgaaaggcgataacggcagcgtgggcgaaccgggcccgaaaggcgataccggcccgagcggcccgccgggcccgccgggcgtgccgggcccggcgggccgcgaaggcccgctgggcaaacagggcaacattggcccgcagggcaaaccgggcccgaaaggcgaagcgggcccgaaaggcgaagtgggcgcgccgggcatgcagggcagcgcgggcgcgcgcggcctggcgggcccgaaaggcgaacgcggcgtgccgggcgaacgcggcgtgccgggcaacgcgggcgcggcgggcagcgcgggcgcgatgggcccgcagggcagcccgggcgcgcgcggcccgccgggcctgaaaggcgataaaggcattccgggcgataaaggcgcgaaaggcgaaagcggcctgccg

SEQ ID NO: 1080 - DNA, 198 bp, Homo sapiens
ggcgaaaaaggcgatccgggcgaagaaggcaaacatggcaaagtgggccgcatgggcccgaaaggcattaaaggcgaactgggcgatatgggcgatcagggcaacattggcaaaaccggcccgattggcaaaaaaggcgataaaggcgaaaaaggcctgctgggcattccgggcgaaaaaggcaaagcgggcaccgtg

SEQ ID NO: 1081 - DNA, 216 bp, Homo sapiens
ggcctgaaaggcgatgcgggcgaaaaaggcgataaaggcgcgccgggccgcccgggccgcgtgggcccgaccggcgaaaaaggcgatatgggcgataaaggccagaaaggcagcgtgggccgccatggcaaaattggcccgattggcagcaaaggcgaaaaaggcgatagcggcgatattggcccgccgggcccgaacggcgaaccgggcctgccg

SEQ ID NO: 1082 - DNA, 171 bp, Homo sapiens
ggctgcccgggcctgccgggcgcgccgggcccgaaaggcgaagcgggcgtgattggcgaacgcggcgaacgcggcctgccgggcgcgccgggcaaagcgggcccggtgggcccgaaaggcgatcgcggcgaaaaaggcatgcgcggcgaaaaaggcgatgcgggccagagc

SEQ ID NO: 1083 - DNA, 135 bp, Homo sapiens
ggctgcccgggcctgccgggcgcgccgggcccgaaaggcgaagcgggcaccaacggcaaacgcggcgaacgcggcccgccgggcccgccgggcaaagcgggcccgccgggcccgaacggcgcgccgggcgaaccg

SEQ ID NO: 1084 - DNA, 99 bp, Homo sapiens
ggcgcgccgggcagcccgggcgaaaaaggcgcgccgggcccgcagggcccgccgggcccgccgggcaaaatgggcccgaaaggcgaaccgggcgatccg

SEQ ID NO: 1085 - DNA, 207 bp, Homo sapiens
ggcccgccgggcccgccgggcgaaaaaggcgatcgcggcccgaccggcgaaagcggcccgcgcggctttccgggcccgattggcccgccgggcctgaaaggcgatcgcggcgcgattggctttccgggcagccgcggcctgccgggctatgcgggccgcccgggcaacagcggcccgaaaggccagaaaggcgaaaaaggcagcggc

SEQ ID NO: 1086 - DNA, 819 bp, Homo sapiens
ggcgaacagggcgcgccgggcctgcagggccataaaggcgcgatgggcatgccgggcgcgccgggcccgccgggcccgccggcggaaaaaggcgcgaaaggcgcgatgggccgcgatggcgcgaccggcccgagcggcccgcagggcccgccgggcgtgaaaggcgaagcgggcctgcagggcccgcagggcgcgccgggcaaacagggcgcgaccggcaccccgggcccgcagggcgaaaaaggcagcaaaggcgatggcggcctgattggcccgaaaggcgaaaccggcaccaaaggcgaaaaaggcgatctgggcctgccgggcagcaaaggcgatcgcggcatgaaaggcgatgcgggcgtgatgggcccgccgggcgcgcagggcagcaaaggcgattttggccgcccgggcccgccgggcctggcgggctttccgggcgcgaaaggcgatcagggccagccgggcctgcagggcgtgccgggcccgccgggcgcggtgggccatccgggcgcgaaaggcgaaccgggcagcgcgggcagcccgggccgcgcgggcctgccgggcagcccgggcagcccgggcgcgaccggcctgaaaggcagcaaaggcgataccggcctgcagggccagcagggccgcaaaggcgaaagcggcgtgccgggcccggcgggcgtgaaaggcgaacagggcagcccgggcctggcgggcccgaaaggcgcgccgggccaggcgggccagaaaggcgatcagggcgtgaaaggcagcagcggcgaacagggcgtgaaaggcgaaaaaggcgaacgcggcgaaaac

SEQ ID NO: 1087 - DNA, 441 bp, Homo sapiens
ggcgcgccgggcccgccgggcccgcgcggctttaaaggcgatatgggcgtgaaaggcccggtgggcggccgcggcccgaaaggcgatccgggcagcctgggcccgctgggcccgcagggcccgcagggccagccgggcgaagcgggcccggtgggcgaacgcggcccggtgggcccgcgcggctttccgggcctgaaaggcagcaaaggcagctttggcaccggcggcccgcgcggccagccgggcccgaaaggcgatattggcccgccgggcccggaaggcccgccgggcagcccgggcccgagcggcccgcagggcaaaccgggcattgcgggcaaaaccggcagcccgggccagcgcggcgcgatgggcccgaaaggcgaaccgggcattcagggcccgccgggcctgccgggcccgccgggcccgccgggcagccag

SEQ ID NO: 1088 - DNA, 441 bp, Homo sapiens
ggcccgccgggcccgcgcggcccgcgcggcgatcgcggcagccagggcccgccgggcccgaccggcaacaaaggccagaaaggcgaaaaaggcgaaccgggcccgccgggcccggcgggcgaacgcggcccgattggcccggcgggcccgccgggcgaacgcggcggcaaaggcagcaaaggcagccagggcccgaaaggcagccgcggcagcccgggcaaaccgggcccgcagggcagcagcggcgatccgggcccgccgggcccgccgggcaaagaaggcctgccgggcccgcagggcccgccgggctttcagggcctgcagggcaccgtgggcgaaccgggcgtgccgggcccgcgcggcctgccgggcctgccgggcgtgccgggcatgccgggcccgaaaggcccgccgggcccgccgggcccgagcggcgcggtg

SEQ ID NO: 1089 - DNA, 225 bp, Homo sapiens
ggcccgccgggcccgaaaggcgatcagggcgatgaaggcaaagaaggccgcccgggcattccgggcctgccgggcctgcgcggcctgccgggcgaacgcggcaccccgggcctgccgggcccgaaaggcgatgatggcaaactgggcgcgaccggcccgatgggcatgcgcggctttaaaggcgatcgcggcccgaaaggcgaaaaaggcgaaaaaggcgatcgc

SEQ ID NO: 1090 - DNA, 108 bp, Homo sapiens
ggcccggcgggcgtgccgggccgcgatggcagcccgggcgcgaacggcattccgggcaccccgggcattccgggccgcgatggctttaaaggcgaaaaaggcgaatgc

SEQ ID NO: 1091 - DNA, 267 bp, Homo sapiens
ggcccgccgggcctgccgggcggccagggcccgccgggcagcccgggcccgaaaggcagcccgggctttccgggcatgccgggcccgccgggccagccgggcccgcgcggcagcatgggcccgatgggcccgagcccggatctgagccatattaaacagggccgccgcggcccggtgggcccgccgggcgcgccgggccgcgatggcagcaaaggcgaacgcggcgcgccgggcccgcgcggcagcccgggcccgccgggcagcttt

SEQ ID NO: 1092 - DNA, 462 bp, Homo sapiens
ggcccgccgggcccgcagggccagtttcgcccgccgggcccgcagggccagatgggcccgcagggcccgccgctgcatcagggcggcggcggcccgcagggctttatgggcccgcagggcccgcagggcccgccgcagggcctgccgcgcccgcaggatatgcatggcccgcagggcatgcagcgccatccgggcccgcatggcccgctgggcccgcagggcccgccgggcccgcagggcagcagcggcccgcagggccatatgggcccgcagggcccgccgggcccgcagggccatattggcccgcagggcccgccgggcccgcagggccatctgggcccgcagggcccgccgggcacccagggcatgcagggcccgccgggcccgcgcggcatgcagggcccgccgcatccgcatggcattcagggcggcccgggcagccagggcattcagggcccggtg

SEQ ID NO: 1093 - DNA, 588 bp, Homo sapiens
ggcagcctgggcagcccgggcccgccgggcccgcagggcccgccgggcctgccgggcaaaaccggcccgaaaggcgaaaaaggcgaactgggccgcccgggccgcaaaggccgcccgggcccgccgggcgtgccgggcatgccgggcccgattggctggccgggcccggaaggcccgcgcggcgaaaaaggcgatctgggcatgatgggcctgccgggcagccgcggcccgatgggcagcaaaggctatccgggcagccgcggcgaaaaaggcagccgcggcgaaaaaggcgatctgggcccgaaaggcgaaaaaggctttccgggctttccgggcatgctgggccagaaaggcgaaatgggcccgaaaggcgaaccgggcattgcgggccatcgcggcccgaccggccgcccgggcaaacgcggcaaacagggccagaaaggcgatagcggcgtgatgggcccgccgggcaaaccgggcccgagcggccagccgggccgcccgggcccgccgggcccgccgccggcgggccagctgattatgggcccgaaaggcgaacgcggctttccgggcccgccgggccgctgc

SEQ ID NO: 1094 - DNA, 177 bp, Homo sapiens
ggcccgccgggcccgaacggcccgccgggcccgccgggcccgccgggcccgcagggcccgccgggcattccgggcattccgggcattccgggcaccaccgtgatgggcccgccgggcccgccgggcccgccgggcccgcagggcccgccgggcctgcagggcccgagcggcgcggcg

SEQ ID NO: 1095 - DNA, 252 bp, Homo sapiens
ggcccgagcggcccgccgggcccgccgggcgcgggcggcctgccgggccataacggcctggatggccagccgggcccgcagggcccgaaaggcgaaaaaggcgcgaacggcaaacgcggcaaaatgggcattccgggcgcggcgggcaacccgggcgaacgcggcgaaaaaggcgatcatggcgaactgggcctgcagggcaacgaaggcccgccgggccagaaaggcgaaaaaggcgataaaggcgatgtg

SEQ ID NO: 1096 - DNA, 3042 bp, Artificial Sequence
  hCol-CNA01 (alpha1(I) THD)
  misc_feature (3)..(3): n is a, c, g, or t
  misc_feature (6)..(6): n is a, c, g, or t
  misc_feature (12)..(12): n is a, c, g, or t
  misc_feature (15)..(15): n is a, c, g, or t
  misc_feature (18)..(18): n is a, c, g, or t
  misc_feature (21)..(21): n is a, c, g, or t
  misc_feature (24)..(24): n is a, c, g, or t
  misc_feature (27)..(27): n is a, c, g, or t
  misc_feature (30)..(30): n is a, c, g, or t
  misc_feature (33)..(33): n is a, c, g, or t
  misc_feature (36)..(36): n is a, c, g, or t
  misc_feature (39)..(39): n is a, c, g, or t
  misc_feature (42)..(42): n is a, c, g, or t
  misc_feature (45)..(45): n is a, c, g, or t
  misc_feature (48)..(48): n is a, c, g, or t
  misc_feature (51)..(51): n is a, c, g, or t
  misc_feature (54)..(54): n is a, c, g, or t
  misc_feature (57)..(57): n is a, c, g, or t
  misc_feature (60)..(60): n is a, c, g, or t
  misc_feature (66)..(66): n is a, c, g, or t
  misc_feature (75)..(75): n is a, c, g, or t
  misc_feature (78)..(78): n is a, c, g, or t
  misc_feature (81)..(81): n is a, c, g, or t
  misc_feature (84)..(84): n is a, c, g, or t
  misc_feature (90)..(90): n is a, c, g, or t
  misc_feature (93)..(93): n is a, c, g, or t
  misc_feature (99)..(99): n is a, c, g, or t
  misc_feature (102)..(102): n is a, c, g, or t
  misc_feature (105)..(105): n is a, c, g, or t
  misc_feature (108)..(108): n is a, c, g, or t
  misc_feature (111)..(111): n is a, c, g, or t
  misc_feature (114)..(114): n is a, c, g, or t
  misc_feature (120)..(120): n is a, c, g, or t
  misc_feature (123)..(123): n is a, c, g, or t
  misc_feature (126)..(126): n is a, c, g, or t
  misc_feature (129)..(129): n is a, c, g, or t
  misc_feature (132)..(132): n is a, c, g, or t
  misc_feature (135)..(135): n is a, c, g, or t
  misc_feature (138)..(138): n is a, c, g, or t
  misc_feature (141)..(141): n is a, c, g, or t
  misc_feature (144)..(144): n is a, c, g, or t
  misc_feature (147)..(147): n is a, c, g, or t
  misc_feature (156)..(156): n is a, c, g, or t
  misc_feature (165)..(165): n is a, c, g, or t
  misc_feature (171)..(171): n is a, c, g, or t
  misc_feature (174)..(174): n is a, c, g, or t
  misc_feature (180)..(180): n is a, c, g, or t
  misc_feature (183)..(183): n is a, c, g, or t
  misc_feature (186)..(186): n is a, c, g, or t
  misc_feature (189)..(189): n is a, c, g, or t
  misc_feature (192)..(192): n is a, c, g, or t
  misc_feature (198)..(198): n is a, c, g, or t
  misc_feature (201)..(201): n is a, c, g, or t
  misc_feature (204)..(204): n is a, c, g, or t
  misc_feature (207)..(207): n is a, c, g, or t
  misc_feature (210)..(210): n is a, c, g, or t
  misc_feature (213)..(213): n is a, c, g, or t
  misc_feature (219)..(219): n is a, c, g, or t
  misc_feature (222)..(222): n is a, c, g, or t
  misc_feature (225)..(225): n is a, c, g, or t
  misc_feature (228)..(228): n is a, c, g, or t
  misc_feature (231)..(231): n is a, c, g, or t
  misc_feature (234)..(234): n is a, c, g, or t
  misc_feature (237)..(237): n is a, c, g, or t
  misc_feature (240)..(240): n is a, c, g, or t
  misc_feature (243)..(243): n is a, c, g, or t
  misc_feature (246)..(246): n is a, c, g, or t
  misc_feature (249)..(249): n is a, c, g, or t
  misc_feature (252)..(252): n is a, c, g, or t
  misc_feature (255)..(255): n is a, c, g, or t
  misc_feature (264)..(264): n is a, c, g, or t
  misc_feature (270)..(270): n is a, c, g, or t
  misc_feature (273)..(273): n is a, c, g, or t
  misc_feature (279)..(279): n is a, c, g, or t
  misc_feature (282)..(282): n is a, c, g, or t
  misc_feature (285)..(285): n is a, c, g, or t
  misc_feature (291)..(291): n is a, c, g, or t
  misc_feature (294)..(294): n is a, c, g, or t
  misc_feature (300)..(300): n is a, c, g, or t
  misc_feature (306)..(306): n is a, c, g, or t
  misc_feature (309)..(309): n is a, c, g, or t
  misc_feature (312)..(312): n is a, c, g, or t
  misc_feature (315)..(315): n is a, c, g, or t
  misc_feature (318)..(318): n is a, c, g, or t
  misc_feature (321)..(321): n is a, c, g, or t
  misc_feature (327)..(327): n is a, c, g, or t
  misc_feature (333)..(333): n is a, c, g, or t
  misc_feature (336)..(336): n is a, c, g, or t
  misc_feature (339)..(339): n is a, c, g, or t
  misc_feature (342)..(342): n is a, c, g, or t
  misc_feature (345)..(345): n is a, c, g, or t
  misc_feature (354)..(354): n is a, c, g, or t
  misc_feature (357)..(357): n is a, c, g, or t
  misc_feature (360)..(360): n is a, c, g, or t
  misc_feature (363)..(363): n is a, c, g, or t
  misc_feature (372)..(372): n is a, c, g, or t
  misc_feature (375)..(375): n is a, c, g, or t
  misc_feature (378)..(378): n is a, c, g, or t
  misc_feature (381)..(381): n is a, c, g, or t
  misc_feature (384)..(384): n is a, c, g, or t
  misc_feature (387)..(387): n is a, c, g, or t
  misc_feature (390)..(390): n is a, c, g, or t
  misc_feature (396)..(396): n is a, c, g, or t
  misc_feature (399)..(399): n is a, c, g, or t
  misc_feature (402)..(402): n is a, c, g, or t
  misc_feature (405)..(405): n is a, c, g, or t
  misc_feature (408)..(408): n is a, c, g, or t
  misc_feature (411)..(411): n is a, c, g, or t
  misc_feature (414)..(414): n is a, c, g, or t
  misc_feature (417)..(417): n is a, c, g, or t
  misc_feature (420)..(420): n is a, c, g, or t
  misc_feature (423)..(423): n is a, c, g, or t
  misc_feature (426)..(426): n is a, c, g, or t
  misc_feature (429)..(429): n is a, c, g, or t
  misc_feature (432)..(432): n is a, c, g, or t
  misc_feature (435)..(435): n is a, c, g, or t
  misc_feature (444)..(444): n is a, c, g, or t
  misc_feature (447)..(447): n is a, c, g, or t
  misc_feature (450)..(450): n is a, c, g, or t
  misc_feature (453)..(453): n is a, c, g, or t
  misc_feature (456)..(456): n is a, c, g, or t
  misc_feature (459)..(459): n is a, c, g, or t
  misc_feature (462)..(462): n is a, c, g, or t
  misc_feature (465)..(465): n is a, c, g, or t
  misc_feature (468)..(468): n is a, c, g, or t
  misc_feature (471)..(471): n is a, c, g, or t
  misc_feature (474)..(474): n is a, c, g, or t
  misc_feature (477)..(477): n is a, c, g, or t
  misc_feature (480)..(480): n is a, c, g, or t
  misc_feature (483)..(483): n is a, c, g, or t
  misc_feature (486)..(486): n is a, c, g, or t
  misc_feature (489)..(489): n is a, c, g, or t
  misc_feature (492)..(492): n is a, c, g, or t
  misc_feature (495)..(495): n is a, c, g, or t
  misc_feature (498)..(498): n is a, c, g, or t
  misc_feature (504)..(504): n is a, c, g, or t
  misc_feature (507)..(507): n is a, c, g, or t
  misc_feature (510)..(510): n is a, c, g, or t
  misc_feature (513)..(513): n is a, c, g, or t
  misc_feature (516)..(516): n is a, c, g, or t
  misc_feature (519)..(519): n is a, c, g, or t
  misc_feature (525)..(525): n is a, c, g, or t
  misc_feature (531)..(531): n is a, c, g, or t
  misc_feature (534)..(534): n is a, c, g, or t
  misc_feature (537)..(537): n is a, c, g, or t
  misc_feature (543)..(543): n is a, c, g, or t
  misc_feature (546)..(546): n is a, c, g, or t
  misc_feature (549)..(549): n is a, c, g, or t
  misc_feature (552)..(552): n is a, c, g, or t
  misc_feature (555)..(555): n is a, c, g, or t
  misc_feature (561)..(561): n is a, c, g, or t
  misc_feature (564)..(564): n is a, c, g, or t
  misc_feature (570)..(570): n is a, c, g, or t
  misc_feature (573)..(573): n is a, c, g, or t
  misc_feature (576)..(576): n is a, c, g, or t
  misc_feature (579)..(579): n is a, c, g, or t
  misc_feature (585)..(585): n is a, c, g, or t
  misc_feature (588)..(588): n is a, c, g, or t
  misc_feature (591)..(591): n is a, c, g, or t
  misc_feature (594)..(594): n is a, c, g, or t
  misc_feature (597)..(597): n is a, c, g, or t
  misc_feature (600)..(600): n is a, c, g, or t
  misc_feature (603)..(603): n is a, c, g, or t
  misc_feature (606)..(606): n is a, c, g, or t
  misc_feature (609)..(609): n is a, c, g, or t
  misc_feature (612)..(612): n is a, c, g, or t
  misc_feature (615)..(615): n is a, c, g, or t
  misc_feature (618)..(618): n is a, c, g, or t
  misc_feature (621)..(621): n is a, c, g, or t
  misc_feature (624)..(624): n is a, c, g, or t
  misc_feature (630)..(630): n is a, c, g, or t
  misc_feature (633)..(633): n is a, c, g, or t
  misc_feature (636)..(636): n is a, c, g, or t
  misc_feature (642)..(642): n is a, c, g, or t
  misc_feature (648)..(648): n is a, c, g, or t
  misc_feature (651)..(651): n is a, c, g, or t
  misc_feature (654)..(654): n is a, c, g, or t
  misc_feature (660)..(660): n is a, c, g, or t
  misc_feature (663)..(663): n is a, c, g, or t
  misc_feature (669)..(669): n is a, c, g, or t
  misc_feature (672)..(672): n is a, c, g, or t
  misc_feature (675)..(675): n is a, c, g, or t
  misc_feature (678)..(678): n is a, c, g, or t
  misc_feature (684)..(684): n is a, c, g, or t
  misc_feature (687)..(687): n is a, c, g, or t
  misc_feature (690)..(690): n is a, c, g, or t
  misc_feature (693)..(693): n is a, c, g, or t
  misc_feature (696)..(696): n is a, c, g, or t
  misc_feature (702)..(702): n is a, c, g, or t
  misc_feature (705)..(705): n is a, c, g, or t
  misc_feature (708)..(708): n is a, c, g, or t
  misc_feature (711)..(711): n is a, c, g, or t
  misc_feature (714)..(714): n is a, c, g, or t
  misc_feature (717)..(717): n is a, c, g, or t
  misc_feature (720)..(720): n is a, c, g, or t
  misc_feature (723)..(723): n is a, c, g, or t
  misc_feature (726)..(726): n is a, c, g, or t
  misc_feature (732)..(732): n is a, c, g, or t
  misc_feature (735)..(735): n is a, c, g, or t
  misc_feature (738)..(738): n is a, c, g, or t
  misc_feature (741)..(741): n is a, c, g, or t
  misc_feature (744)..(744): n is a, c, g, or t
  misc_feature (747)..(747): n is a, c, g, or t
  misc_feature (750)..(750): n is a, c, g, or t
  misc_feature (753)..(753): n is a, c, g, or t
  misc_feature (759)..(759): n is a, c, g, or t
  misc_feature (765)..(765): n is a, c, g, or t
  misc_feature (768)..(768): n is a, c, g, or t
  misc_feature (774)..(774): n is a, c, g, or t
  misc_feature (777)..(777): n is a, c, g, or t
  misc_feature (780)..(780): n is a, c, g, or t
  misc_feature (783)..(783): n is a, c, g, or t
  misc_feature (786)..(786): n is a, c, g, or t
  misc_feature (789)..(789): n is a, c, g, or t
  misc_feature (795)..(795): n is a, c, g, or t
  misc_feature (801)..(801): n is a, c, g, or t
  misc_feature (804)..(804): n is a, c, g, or t
  misc_feature (807)..(807): n is a, c, g, or t
  misc_feature (813)..(813): n is a, c, g, or t
  misc_feature (819)..(819): n is a, c, g, or t
  misc_feature (822)..(822): n is a, c, g, or t
  misc_feature (825)..(825): n is a, c, g, or t
  misc_feature (828)..(828): n is a, c, g, or t
  misc_feature (831)..(831): n is a, c, g, or t
  misc_feature (834)..(834): n is a, c, g, or t
  misc_feature (840)..(840): n is a, c, g, or t
  misc_feature (843)..(843): n is a, c, g, or t
  misc_feature (846)..(846): n is a, c, g, or t
  misc_feature (849)..(849): n is a, c, g, or t
  misc_feature (852)..(852): n is a, c, g, or t
  misc_feature (855)..(855): n is a, c, g, or t
  misc_feature (858)..(858): n is a, c, g, or t
  misc_feature (867)..(867): n is a, c, g, or t
  misc_feature (873)..(873): n is a, c, g, or t
  misc_feature (876)..(876): n is a, c, g, or t
  misc_feature (879)..(879): n is a, c, g, or t
  misc_feature (882)..(882): n is a, c, g, or t
  misc_feature (885)..(885): n is a, c, g, or t
  misc_feature (891)..(891): n is a, c, g, or t
  misc_feature (894)..(894): n is a, c, g, or t
  misc_feature (897)..(897): n is a, c, g, or t
  misc_feature (900)..(900): n is a, c, g, or t
  misc_feature (903)..(903): n is a, c, g, or t
  misc_feature (906)..(906): n is a, c, g, or t
  misc_feature (909)..(909): n is a, c, g, or t
  misc_feature (912)..(912): n is a, c, g, or t
  misc_feature (915)..(915): n is a, c, g, or t
  misc_feature (918)..(918): n is a, c, g, or t
  misc_feature (921)..(921): n is a, c, g, or t
  misc_feature (927)..(927): n is a, c, g, or t
  misc_feature (930)..(930): n is a, c, g, or t
  misc_feature (933)..(933): n is a, c, g, or t
  misc_feature (936)..(936): n is a, c, g, or t
  misc_feature (939)..(939): n is a, c, g, or t
  misc_feature (942)..(942): n is a, c, g, or t
  misc_feature (945)..(945): n is a, c, g, or t
  misc_feature (948)..(948): n is a, c, g, or t
  misc_feature (954)..(954): n is a, c, g, or t
  misc_feature (957)..(957): n is a, c, g, or t
  misc_feature (960)..(960): n is a, c, g, or t
  misc_feature (966)..(966): n is a, c, g, or t
  misc_feature (969)..(969): n is a, c, g, or t
  misc_feature (972)..(972): n is a, c, g, or t
  misc_feature (975)..(975): n is a, c, g, or t
  misc_feature (978)..(978): n is a, c, g, or t
  misc_feature (984)..(984): n is a, c, g, or t
  misc_feature (987)..(987): n is a, c, g, or t
  misc_feature (990)..(990): n is a, c, g, or t
  misc_feature (993)..(993): n is a, c, g, or t
  misc_feature (999)..(999): n is a, c, g, or t
  misc_feature (1002)..(1002): n is a, c, g, or t
  misc_feature (1005)..(1005): n is a, c, g, or t
  misc_feature (1008)..(1008): n is a, c, g, or t
  misc_feature (1011)..(1011): n is a, c, g, or t
  misc_feature (1014)..(1014): n is a, c, g, or t
  misc_feature (1017)..(1017): n is a, c, g, or t
  misc_feature (1020)..(1020): n is a, c, g, or t
  misc_feature (1023)..(1023): n is a, c, g, or t
  misc_feature (1029)..(1029): n is a, c, g, or t
  misc_feature (1032)..(1032): n is a, c, g, or t
  misc_feature (1035)..(1035): n is a, c, g, or t
  misc_feature (1038)..(1038): n is a, c, g, or t
  misc_feature (1044)..(1044): n is a, c, g, or t
  misc_feature (1047)..(1047): n is a, c, g, or t
  misc_feature (1050)..(1050): n is a, c, g, or t
  misc_feature (1053)..(1053): n is a, c, g, or t
  misc_feature (1056)..(1056): n is a, c, g, or t
  misc_feature (1062)..(1062): n is a, c, g, or t
  misc_feature (1065)..(1065): n is a, c, g, or t
  misc_feature (1068)..(1068): n is a, c, g, or t
  misc_feature (1071)..(1071): n is a, c, g, or t
  misc_feature (1074)..(1074): n is a, c, g, or t
  misc_feature (1077)..(1077): n is a, c, g, or t
  misc_feature (1083)..(1083): n is a, c, g, or t
  misc_feature (1086)..(1086): n is a, c, g, or t
  misc_feature (1089)..(1089): n is a, c, g, or t
  misc_feature (1092)..(1092): n is a, c, g, or t
  misc_feature (1095)..(1095): n is a, c, g, or t
  misc_feature (1098)..(1098): n is a, c, g, or t
  misc_feature (1101)..(1101): n is a, c, g, or t
  misc_feature (1104)..(1104): n is a, c, g, or t
  misc_feature (1107)..(1107): n is a, c, g, or t
  misc_feature (1110)..(1110): n is a, c, g, or t
  misc_feature (1113)..(1113): n is a, c, g, or t
  misc_feature (1119)..(1119): n is a, c, g, or t
  misc_feature (1125)..(1125): n is a, c, g, or t
  misc_feature (1128)..(1128): n is a, c, g, or t
  misc_feature (1131)..(1131): n is a, c, g, or t
  misc_feature (1134)..(1134): n is a, c, g, or t
  misc_feature (1137)..(1137): n is a, c, g, or t
  misc_feature (1140)..(1140): n is a, c, g, or t
  misc_feature (1143)..(1143): n is a, c, g, or t
  misc_feature (1146)..(1146): n is a, c, g, or t
  misc_feature (1155)..(1155): n is a, c, g, or t
  misc_feature (1158)..(1158): n is a, c, g, or t
  misc_feature (1161)..(1161): n is a, c, g, or t
  misc_feature (1164)..(1164): n is a, c, g, or t
  misc_feature (1167)..(1167): n is a, c, g, or t
  misc_feature (1170)..(1170): n is a, c, g, or t
  misc_feature (1173)..(1173): n is a, c, g, or t
  misc_feature (1176)..(1176): n is a, c, g, or t
  misc_feature (1179)..(1179): n is a, c, g, or t
  misc_feature (1182)..(1182): n is a, c, g, or t
  misc_feature (1185)..(1185): n is a, c, g, or t
  misc_feature (1188)..(1188): n is a, c, g, or t
  misc_feature (1191)..(1191): n is a, c, g, or t
  misc_feature (1197)..(1197): n is a, c, g, or t
  misc_feature (1200)..(1200): n is a, c, g, or t
  misc_feature (1203)..(1203): n is a, c, g, or t
  misc_feature (1209)..(1209): n is a, c, g, or t
  misc_feature (1215)..(1215): n is a, c, g, or t
  misc_feature (1218)..(1218): n is a, c, g, or t
  misc_feature (1221)..(1221): n is a, c, g, or t
  misc_feature (1227)..(1227): n is a, c, g, or t
  misc_feature (1230)..(1230): n is a, c, g, or t
  misc_feature (1233)..(1233): n is a, c, g, or t
  misc_feature (1236)..(1236): n is a, c, g, or t
  misc_feature (1242)..(1242): n is a, c, g, or t
  misc_feature (1245)..(1245): n is a, c, g, or t
  misc_feature (1251)..(1251): n is a, c, g, or t
  misc_feature (1254)..(1254): n is a, c, g, or t
  misc_feature (1260)..(1260): n is a, c, g, or t
  misc_feature (1263)..(1263): n is a, c, g, or t
  misc_feature (1266)..(1266): n is a, c, g, or t
  misc_feature (1269)..(1269): n is a, c, g, or t
  misc_feature (1272)..(1272): n is a, c, g, or t
  misc_feature (1275)..(1275): n is a, c, g, or t
  misc_feature (1278)..(1278): n is a, c, g, or t
  misc_feature (1281)..(1281): n is a, c, g, or t
  misc_feature (1284)..(1284): n is a, c, g, or t
  misc_feature (1287)..(1287): n is a, c, g, or t
  misc_feature (1290)..(1290): n is a, c, g, or t
  misc_feature (1293)..(1293): n is a, c, g, or t
  misc_feature (1296)..(1296): n is a, c, g, or t
  misc_feature (1299)..(1299): n is a, c, g, or t
  misc_feature (1308)..(1308): n is a, c, g, or t
  misc_feature (1314)..(1314): n is a, c, g, or t
  misc_feature (1317)..(1317): n is a, c, g, or t
  misc_feature (1320)..(1320): n is a, c, g, or t
  misc_feature (1326)..(1326): n is a, c, g, or t
  misc_feature (1329)..(1329): n is a, c, g, or t
  misc_feature (1332)..(1332): n is a, c, g, or t
  misc_feature (1335)..(1335): n is a, c, g, or t
  misc_feature (1338)..(1338): n is a, c, g, or t
  misc_feature (1341)..(1341): n is a, c, g, or t
  misc_feature (1344)..(1344): n is a, c, g, or t
  misc_feature (1347)..(1347): n is a, c, g, or t
  misc_feature (1350)..(1350): n is a, c, g, or t
  misc_feature (1353)..(1353): n is a, c, g, or t
  misc_feature (1359)..(1359): n is a, c, g, or t
  misc_feature (1362)..(1362): n is a, c, g, or t
  misc_feature (1371)..(1371): n is a, c, g, or t
  misc_feature (1374)..(1374): n is a, c, g, or t
  misc_feature (1377)..(1377): n is a, c, g, or t
  misc_feature (1380)..(1380): n is a, c, g, or t
  misc_feature (1383)..(1383): n is a, c, g, or t
  misc_feature (1386)..(1386): n is a, c, g, or t
  misc_feature (1389)..(1389): n is a, c, g, or t
  misc_feature (1398)..(1398): n is a, c, g, or t
  misc_feature (1401)..(1401): n is a, c, g, or t
  misc_feature (1404)..(1404): n is a, c, g, or t
  misc_feature (1407)..(1407): n is a, c, g, or t
  misc_feature (1410)..(1410): n is a, c, g, or t
  misc_feature (1413)..(1413): n is a, c, g, or t
  misc_feature (1416)..(1416): n is a, c, g, or t
  misc_feature (1419)..(1419): n is a, c, g, or t
  misc_feature (1422)..(1422): n is a, c, g, or t
  misc_feature (1425)..(1425): n is a, c, g, or t
  misc_feature (1431)..(1431): n is a, c, g, or t
  misc_feature (1434)..(1434): n is a, c, g, or t
  misc_feature (1440)..(1440): n is a, c, g, or t
  misc_feature (1443)..(1443): n is a, c, g, or t
  misc_feature (1452)..(1452): n is a, c, g, or t
  misc_feature (1455)..(1455): n is a, c, g, or t
  misc_feature (1458)..(1458): n is a, c, g, or t
  misc_feature (1461)..(1461): n is a, c, g, or t
  misc_feature (1467)..(1467): n is a, c, g, or t
  misc_feature (1470)..(1470): n is a, c, g, or t
  misc_feature (1473)..(1473): n is a, c, g, or t
  misc_feature (1476)..(1476): n is a, c, g, or t
  misc_feature (1479)..(1479): n is a, c, g, or t
  misc_feature (1482)..(1482): n is a, c, g, or t
  misc_feature (1485)..(1485): n is a, c, g, or t
  misc_feature (1488)..(1488): n is a, c, g, or t
  misc_feature (1491)..(1491): n is a, c, g, or t
  misc_feature (1494)..(1494): n is a, c, g, or t
  misc_feature (1497)..(1497): n is a, c, g, or t
  misc_feature (1503)..(1503): n is a, c, g, or t
  misc_feature (1506)..(1506): n is a, c, g, or t
  misc_feature (1512)..(1512): n is a, c, g, or t
  misc_feature (1515)..(1515): n is a, c, g, or t
  misc_feature (1521)..(1521): n is a, c, g, or t
  misc_feature (1524)..(1524): n is a, c, g, or t
  misc_feature (1527)..(1527): n is a, c, g, or t
  misc_feature (1533)..(1533): n is a, c, g, or t
  misc_feature (1536)..(1536): n is a, c, g, or t
  misc_feature (1539)..(1539): n is a, c, g, or t
  misc_feature (1542)..(1542): n is a, c, g, or t
  misc_feature (1545)..(1545): n is a, c, g, or t
  misc_feature (1548)..(1548): n is a, c, g, or t
  misc_feature (1551)..(1551): n is a, c, g, or t
  misc_feature (1554)..(1554): n is a, c, g, or t
  misc_feature (1557)..(1557): n is a, c, g, or t
  misc_feature (1560)..(1560): n is a, c, g, or t
  misc_feature (1563)..(1563): n is a, c, g, or t
  misc_feature (1569)..(1569): n is a, c, g, or t
  misc_feature (1572)..(1572): n is a, c, g, or t
  misc_feature (1575)..(1575): n is a, c, g, or t
  misc_feature (1578)..(1578): n is a, c, g, or t
  misc_feature (1587)..(1587): n is a, c, g, or t
  misc_feature (1590)..(1590): n is a, c, g, or t
  misc_feature (1596)..(1596): n is a, c, g, or t
  misc_feature (1602)..(1602): n is a, c, g, or t
  misc_feature (1605)..(1605): n is a, c, g, or t
  misc_feature (1608)..(1608): n is a, c, g, or t
  misc_feature (1611)..(1611): n is a, c, g, or t
  misc_feature (1614)..(1614): n is a, c, g, or t
  misc_feature (1617)..(1617): n is a, c, g, or t
  misc_feature (1620)..(1620): n is a, c, g, or t
  misc_feature (1623)..(1623): n is a, c, g, or t
  misc_feature (1626)..(1626): n is a, c, g, or t
  misc_feature (1632)..(1632): n is a, c, g, or t
  misc_feature (1635)..(1635): n is a, c, g, or t
  misc_feature (1638)..(1638): n is a, c, g, or t
  misc_feature (1641)..(1641): n is a, c, g, or t
  misc_feature (1644)..(1644): n is a, c, g, or t
  misc_feature (1650)..(1650): n is a, c, g, or t
  misc_feature (1656)..(1656): n is a, c, g, or t
  misc_feature (1659)..(1659): n is a, c, g, or t
  misc_feature (1665)..(1665): n is a, c, g, or t
  misc_feature (1668)..(1668): n is a, c, g, or t
  misc_feature (1671)..(1671): n is a, c, g, or t
  misc_feature (1674)..(1674): n is a, c, g, or t
  misc_feature (1677)..(1677): n is a, c, g, or t
  misc_feature (1680)..(1680): n is a, c, g, or t
  misc_feature (1683)..(1683): n is a, c, g, or t
  misc_feature (1686)..(1686): n is a, c, g, or t
  misc_feature (1689)..(1689): n is a, c, g, or t
  misc_feature (1695)..(1695): n is a, c, g, or t
  misc_feature (1701)..(1701): n is a, c, g, or t
  misc_feature (1704)..(1704): n is a, c, g, or t
  misc_feature (1710)..(1710): n is a, c, g, or t
  misc_feature (1713)..(1713): n is a, c, g, or t
  misc_feature (1716)..(1716): n is a, c, g, or t
  misc_feature (1722)..(1722): n is a, c, g, or t
  misc_feature (1725)..(1725): n is a, c, g, or t
  misc_feature (1731)..(1731): n is a, c, g, or t
  misc_feature (1734)..(1734): n is a, c, g, or t
  misc_feature (1737)..(1737): n is a, c, g, or t
  misc_feature (1740)..(1740): n is a, c, g, or t
  misc_feature (1749)..(1749): n is a, c, g, or t
  misc_feature (1752)..(1752): n is a, c, g, or t
  misc_feature (1755)..(1755): n is a, c, g, or t
  misc_feature (1758)..(1758): n is a, c, g, or t
  misc_feature (1761)..(1761): n is a, c, g, or t
  misc_feature (1764)..(1764): n is a, c, g, or t
  misc_feature (1767)..(1767): n is a, c, g, or t
  misc_feature (1770)..(1770): n is a, c, g, or t
  misc_feature (1776)..(1776): n is a, c, g, or t
  misc_feature (1779)..(1779): n is a, c, g, or t
  misc_feature (1782)..(1782): n is a, c, g, or t
  misc_feature (1785)..(1785): n is a, c, g, or t
  misc_feature (1788)..(1788): n is a, c, g, or t
  misc_feature (1791)..(1791): n is a, c, g, or t
  misc_feature (1794)..(1794): n is a, c, g, or t
  misc_feature (1797)..(1797): n is a, c, g, or t
  misc_feature (1800)..(1800): n is a, c, g, or t
  misc_feature (1803)..(1803): n is a, c, g, or t
  misc_feature (1812)..(1812): n is a, c, g, or t
  misc_feature (1818)..(1818): n is a, c, g, or t
  misc_feature (1821)..(1821): n is a, c, g, or t
  misc_feature (1824)..(1824): n is a, c, g, or t
  misc_feature (1827)..(1827): n is a, c, g, or t
  misc_feature (1830)..(1830): n is a, c, g, or t
  misc_feature (1833)..(1833): n is a, c, g, or t
  misc_feature (1836)..(1836): n is a, c, g, or t
  misc_feature (1839)..(1839): n is a, c, g, or t
  misc_feature (1842)..(1842): n is a, c, g, or t
  misc_feature (1845)..(1845): n is a, c, g, or t
  misc_feature (1848)..(1848): n is a, c, g, or t
  misc_feature (1851)..(1851): n is a, c, g, or t
  misc_feature (1854)..(1854): n is a, c, g, or t
  misc_feature (1857)..(1857): n is a, c, g, or t
  misc_feature (1860)..(1860): n is a, c, g, or t
  misc_feature (1863)..(1863): n is a, c, g, or t
  misc_feature (1866)..(1866): n is a, c, g, or t
  misc_feature (1872)..(1872): n is a, c, g, or t
  misc_feature (1875)..(1875): n is a, c, g, or t
  misc_feature (1881)..(1881): n is a, c, g, or t
  misc_feature (1884)..(1884): n is a, c, g, or t
  misc_feature (1887)..(1887): n is a, c, g, or t
  misc_feature (1890)..(1890): n is a, c, g, or t
  misc_feature (1893)..(1893): n is a, c, g, or t
  misc_feature (1896)..(1896): n is a, c, g, or t
  misc_feature (1899)..(1899): n is a, c, g, or t
  misc_feature (1902)..(1902): n is a, c, g, or t
  misc_feature (1908)..(1908): n is a, c, g, or t
  misc_feature (1911)..(1911): n is a, c, g, or t
  misc_feature (1914)..(1914): n is a, c, g, or t
  misc_feature (1917)..(1917): n is a, c, g, or t
  misc_feature (1920)..(1920): n is a, c, g, or t
  misc_feature (1923)..(1923): n is a, c, g, or t
  misc_feature (1929)..(1929): n is a, c, g, or t
  misc_feature (1935)..(1935): n is a, c, g, or t
  misc_feature (1938)..(1938): n is a, c, g, or t
  misc_feature (1941)..(1941): n is a, c, g, or t
  misc_feature (1947)..(1947): n is a, c, g, or t
  misc_feature (1953)..(1953): n is a, c, g, or t
  misc_feature (1956)..(1956): n is a, c, g, or t
  misc_feature (1962)..(1962): n is a, c, g, or t
  misc_feature (1965)..(1965): n is a, c, g, or t
  misc_feature (1968)..(1968): n is a, c, g, or t
  misc_feature (1974)..(1974): n is a, c, g, or t
  misc_feature (1980)..(1980): n is a, c, g, or t
  misc_feature (1983)..(1983): n is a, c, g, or t
  misc_feature (1986)..(1986): n is a, c, g, or t
  misc_feature (1989)..(1989): n is a, c, g, or t
  misc_feature (1992)..(1992): n is a, c, g, or t
  misc_feature (1995)..(1995): n is a, c, g, or t
  misc_feature (1998)..(1998): n is a, c, g, or t
  misc_feature (2001)..(2001): n is a, c, g, or t
  misc_feature (2004)..(2004): n is a, c, g, or t
  misc_feature (2007)..(2007): n is a, c, g, or t
  misc_feature (2010)..(2010): n is a, c, g, or t
  misc_feature (2013)..(2013): n is a, c, g, or t
  misc_feature (2016)..(2016): n is a, c, g, or t
  misc_feature (2019)..(2019): n is a, c, g, or t
  misc_feature (2022)..(2022): n is a, c, g, or t
  misc_feature (2028)..(2028): n is a, c, g, or t
  misc_feature (2034)..(2034): n is a, c, g, or t
  misc_feature (2037)..(2037): n is a, c, g, or t
  misc_feature (2040)..(2040): n is a, c, g, or t
  misc_feature (2043)..(2043): n is a, c, g, or t
  misc_feature (2046)..(2046): n is a, c, g, or t
  misc_feature (2049)..(2049): n is a, c, g, or t
  misc_feature (2055)..(2055): n is a, c, g, or t
  misc_feature (2058)..(2058): n is a, c, g, or t
  misc_feature (2061)..(2061): n is a, c, g, or t
  misc_feature (2064)..(2064): n is a, c, g, or t
  misc_feature (2067)..(2067): n is a, c, g, or t
  misc_feature (2070)..(2070): n is a, c, g, or t
  misc_feature (2073)..(2073): n is a, c, g, or t
  misc_feature (2076)..(2076): n is a, c, g, or t
  misc_feature (2079)..(2079): n is a, c, g, or t
  misc_feature (2082)..(2082): n is a, c, g, or t
  misc_feature (2085)..(2085): n is a, c, g, or t
  misc_feature (2088)..(2088): n is a, c, g, or t
  misc_feature (2091)..(2091): n is a, c, g, or t
  misc_feature (2097)..(2097): n is a, c, g, or t
  misc_feature (2100)..(2100): n is a, c, g, or t
  misc_feature (2103)..(2103): n is a, c, g, or t
  misc_feature (2106)..(2106): n is a, c, g, or t
  misc_feature (2109)..(2109): n is a, c, g, or t
  misc_feature (2112)..(2112): n is a, c, g, or t
  misc_feature (2115)..(2115): n is a, c, g, or t
  misc_feature (2118)..(2118): n is a, c, g, or t
  misc_feature (2121)..(2121): n is a, c, g, or t
  misc_feature (2124)..(2124): n is a, c, g, or t
  misc_feature (2127)..(2127): n is a, c, g, or t
  misc_feature (2130)..(2130): n is a, c, g, or t
  misc_feature (2133)..(2133): n is a, c, g, or t
  misc_feature (2136)..(2136): n is a, c, g, or t
  misc_feature (2142)..(2142): n is a, c, g, or t
  misc_feature (2145)..(2145): n is a, c, g, or t
  misc_feature (2148)..(2148): n is a, c, g, or t
  misc_feature (2151)..(2151): n is a, c, g, or t
  misc_feature (2154)..(2154): n is a, c, g, or t
  misc_feature (2157)..(2157): n is a, c, g, or t
  misc_feature (2160)..(2160): n is a, c, g, or t
  misc_feature (2163)..(2163): n is a, c, g, or t
  misc_feature (2166)..(2166): n is a, c, g, or t
  misc_feature (2169)..(2169): n is a, c, g, or t
  misc_feature (2172)..(2172): n is a, c, g, or t
  misc_feature (2181)..(2181): n is a, c, g, or t
  misc_feature (2184)..(2184): n is a, c, g, or t
  misc_feature (2190)..(2190): n is a, c, g, or t
  misc_feature (2193)..(2193): n is a, c, g, or t
  misc_feature (2196)..(2196): n is a, c, g, or t
  misc_feature (2199)..(2199): n is a, c, g, or t
  misc_feature (2205)..(2205): n is a, c, g, or t
  misc_feature (2208)..(2208): n is a, c, g, or t
  misc_feature (2211)..(2211): n is a, c, g, or t
  misc_feature (2214)..(2214): n is a, c, g, or t
  misc_feature (2217)..(2217): n is a, c, g, or t
  misc_feature (2220)..(2220): n is a, c, g, or t
  misc_feature (2223)..(2223): n is a, c, g, or t
  misc_feature (2226)..(2226): n is a, c, g, or t
  misc_feature (2232)..(2232): n is a, c, g, or t
  misc_feature (2235)..(2235): n is a, c, g, or t
  misc_feature (2238)..(2238): n is a, c, g, or t
  misc_feature (2241)..(2241): n is a, c, g, or t
  misc_feature (2244)..(2244): n is a, c, g, or t
  misc_feature (2247)..(2247): n is a, c, g, or t
  misc_feature (2250)..(2250): n is a, c, g, or t
  misc_feature (2253)..(2253): n is a, c, g, or t
  misc_feature (2256)..(2256): n is a, c, g, or t
  misc_feature (2259)..(2259): n is a, c, g, or t
  misc_feature (2262)..(2262): n is a, c, g, or t
  misc_feature (2271)..(2271): n is a, c, g, or t
  misc_feature (2274)..(2274): n is a, c, g, or t
  misc_feature (2277)..(2277): n is a, c, g, or t
  misc_feature (2280)..(2280): n is a, c, g, or t
  misc_feature (2283)..(2283): n is a, c, g, or t
  misc_feature (2289)..(2289): n is a, c, g, or t
  misc_feature (2292)..(2292): n is a, c, g, or t
  misc_feature (2295)..(2295): n is a, c, g, or t
  misc_feature (2298)..(2298): n is a, c, g, or t
  misc_feature (2301)..(2301): n is a, c, g, or t
  misc_feature (2304)..(2304): n is a, c, g, or t
  misc_feature (2307)..(2307): n is a, c, g, or t
  misc_feature (2310)..(2310): n is a, c, g, or t
  misc_feature (2313)..(2313): n is a, c, g, or t
  misc_feature (2316)..(2316): n is a, c, g, or t
  misc_feature (2319)..(2319): n is a, c, g, or t
  misc_feature (2325)..(2325): n is a, c, g, or t
  misc_feature (2331)..(2331): n is a, c, g, or t
  misc_feature (2334)..(2334): n is a, c, g, or t
  misc_feature (2340)..(2340): n is a, c, g, or t
  misc_feature (2343)..(2343): n is a, c, g, or t
  misc_feature (2346)..(2346): n is a, c, g, or t
  misc_feature (2349)..(2349): n is a, c, g, or t
  misc_feature (2352)..(2352): n is a, c, g, or t
  misc_feature (2355)..(2355): n is a, c, g, or t
  misc_feature (2358)..(2358): n is a, c, g, or t
  misc_feature (2361)..(2361): n is a, c, g, or t
  misc_feature (2367)..(2367): n is a, c, g, or t
  misc_feature (2370)..(2370): n is a, c, g, or t
  misc_feature (2376)..(2376): n is a, c, g, or t
  misc_feature (2379)..(2379): n is a, c, g, or t
  misc_feature (2385)..(2385): n is a, c, g, or t
  misc_feature (2388)..(2388): n is a, c, g, or t
  misc_feature (2391)..(2391): n is a, c, g, or t
  misc_feature (2394)..(2394): n is a, c, g, or t
  misc_feature (2397)..(2397): n is a, c, g, or t
  misc_feature (2400)..(2400): n is a, c, g, or t
  misc_feature (2403)..(2403): n is a, c, g, or t
  misc_feature (2406)..(2406): n is a, c, g, or t
  misc_feature (2412)..(2412): n is a, c, g, or t
  misc_feature (2415)..(2415): n is a, c, g, or t
  misc_feature (2424)..(2424): n is a, c, g, or t
  misc_feature (2427)..(2427): n is a, c, g, or t
  misc_feature (2430)..(2430): n is a, c, g, or t
  misc_feature (2433)..(2433): n is a, c, g, or t
  misc_feature (2436)..(2436): n is a, c, g, or t
  misc_feature (2439)..(2439): n is a, c, g, or t
  misc_feature (2442)..(2442): n is a, c, g, or t
  misc_feature (2448)..(2448): n is a, c, g, or t
  misc_feature (2451)..(2451): n is a, c, g, or t
  misc_feature (2454)..(2454): n is a, c, g, or t
  misc_feature (2457)..(2457): n is a, c, g, or t
  misc_feature (2460)..(2460): n is a, c, g, or t
  misc_feature (2463)..(2463): n is a, c, g, or t
  misc_feature (2469)..(2469): n is a, c, g, or t
  misc_feature (2472)..(2472): n is a, c, g, or t
  misc_feature (2475)..(2475): n is a, c, g, or t
  misc_feature (2478)..(2478): n is a, c, g, or t
  misc_feature (2481)..(2481): n is a, c, g, or t
  misc_feature (2484)..(2484): n is a, c, g, or t
  misc_feature (2487)..(2487): n is a, c, g, or t
  misc_feature (2490)..(2490): n is a, c, g, or t
  misc_feature (2493)..(2493): n is a, c, g, or t
  misc_feature (2496)..(2496): n is a, c, g, or t
  misc_feature (2502)..(2502): n is a, c, g, or t
  misc_feature (2505)..(2505): n is a, c, g, or t
  misc_feature (2508)..(2508): n is a, c, g, or t
  misc_feature (2514)..(2514): n is a, c, g, or t
  misc_feature (2517)..(2517): n is a, c, g, or t
  misc_feature (2520)..(2520): n is a, c, g, or t
  misc_feature (2523)..(2523): n is a, c, g, or t
  misc_feature (2526)..(2526): n is a, c, g, or t
  misc_feature (2532)..(2532): n is a, c, g, or t
  misc_feature (2535)..(2535): n is a, c, g, or t
  misc_feature (2538)..(2538): n is a, c, g, or t
  misc_feature (2541)..(2541): n is a, c, g, or t
  misc_feature (2544)..(2544): n is a, c, g, or t
  misc_feature (2550)..(2550): n is a, c, g, or t
  misc_feature (2553)..(2553): n is a, c, g, or t
  misc_feature (2556)..(2556): n is a, c, g, or t
  misc_feature (2559)..(2559): n is a, c, g, or t
  misc_feature (2562)..(2562): n is a, c, g, or t
  misc_feature (2568)..(2568): n is a, c, g, or t
  misc_feature (2574)..(2574): n is a, c, g, or t
  misc_feature (2577)..(2577): n is a, c, g, or t
  misc_feature (2583)..(2583): n is a, c, g, or t
  misc_feature (2586)..(2586): n is a, c, g, or t
  misc_feature (2589)..(2589): n is a, c, g, or t
  misc_feature (2592)..(2592): n is a, c, g, or t
  misc_feature (2595)..(2595): n is a, c, g, or t
  misc_feature (2598)..(2598): n is a, c, g, or t
  misc_feature (2601)..(2601): n is a, c, g, or t
  misc_feature (2604)..(2604): n is a, c, g, or t
  misc_feature (2607)..(2607): n is a, c, g, or t
  misc_feature (2610)..(2610): n is a, c, g, or t
  misc_feature (2613)..(2613): n is a, c, g, or t
  misc_feature (2616)..(2616): n is a, c, g, or t
  misc_feature (2619)..(2619): n is a, c, g, or t
  misc_feature (2622)..(2622): n is a, c, g, or t
  misc_feature (2625)..(2625): n is a, c, g, or t
  misc_feature (2628)..(2628): n is a, c, g, or t
  misc_feature (2631)..(2631): n is a, c, g, or t
  misc_feature (2634)..(2634): n is a, c, g, or t
  misc_feature (2637)..(2637): n is a, c, g, or t
  misc_feature (2640)..(2640): n is a, c, g, or t
  misc_feature (2643)..(2643): n is a, c, g, or t
  misc_feature (2646)..(2646): n is a, c, g, or t
  misc_feature (2649)..(2649): n is a, c, g, or t
  misc_feature (2655)..(2655): n is a, c, g, or t
  misc_feature (2658)..(2658): n is a, c, g, or t
  misc_feature (2664)..(2664): n is a, c, g, or t
  misc_feature (2667)..(2667): n is a, c, g, or t
  misc_feature (2673)..(2673): n is a, c, g, or t
  misc_feature (2676)..(2676): n is a, c, g, or t
  misc_feature (2679)..(2679): n is a, c, g, or t
  misc_feature (2682)..(2682): n is a, c, g, or t
  misc_feature (2685)..(2685): n is a, c, g, or t
  misc_feature (2688)..(2688): n is a, c, g, or t
  misc_feature (2691)..(2691): n is a, c, g, or t
  misc_feature (2694)..(2694): n is a, c, g, or t
  misc_feature (2697)..(2697): n is a, c, g, or t
  misc_feature (2700)..(2700): n is a, c, g, or t
  misc_feature (2703)..(2703): n is a, c, g, or t
  misc_feature (2706)..(2706): n is a, c, g, or t
  misc_feature (2709)..(2709): n is a, c, g, or t
  misc_feature (2712)..(2712): n is a, c, g, or t
  misc_feature (2715)..(2715): n is a, c, g, or t
  misc_feature (2718)..(2718): n is a, c, g, or t
  misc_feature (2721)..(2721): n is a, c, g, or t
  misc_feature (2724)..(2724): n is a, c, g, or t
  misc_feature (2727)..(2727): n is a, c, g, or t
  misc_feature (2730)..(2730): n is a, c, g, or t
  misc_feature (2733)..(2733): n is a, c, g, or t
  misc_feature (2739)..(2739): n is a, c, g, or t
  misc_feature (2742)..(2742): n is a, c, g, or t
  misc_feature (2745)..(2745): n is a, c, g, or t
  misc_feature (2748)..(2748): n is a, c, g, or t
  misc_feature (2757)..(2757): n is a, c, g, or t
  misc_feature (2763)..(2763): n is a, c, g, or t
  misc_feature (2766)..(2766): n is a, c, g, or t
  misc_feature (2775)..(2775): n is a, c, g, or t
  misc_feature (2781)..(2781): n is a, c, g, or t
  misc_feature (2784)..(2784): n is a, c, g, or t
  misc_feature (2793)..(2793): n is a, c, g, or t
  misc_feature (2799)..(2799): n is a, c, g, or t
  misc_feature (2802)..(2802): n is a, c, g, or t
  misc_feature (2808)..(2808): n is a, c, g, or t
  misc_feature (2811)..(2811): n is a, c, g, or t
  misc_feature (2814)..(2814): n is a, c, g, or t
  misc_feature (2820)..(2820): n is a, c, g, or t
  misc_feature (2823)..(2823): n is a, c, g, or t
  misc_feature (2826)..(2826): n is a, c, g, or t
  misc_feature (2829)..(2829): n is a, c, g, or t
  misc_feature (2832)..(2832): n is a, c, g, or t
  misc_feature (2835)..(2835): n is a, c, g, or t
  misc_feature (2838)..(2838): n is a, c, g, or t
  misc_feature (2841)..(2841): n is a, c, g, or t
  misc_feature (2844)..(2844): n is a, c, g, or t
  misc_feature (2847)..(2847): n is a, c, g, or t
  misc_feature (2856)..(2856): n is a, c, g, or t
  misc_feature (2859)..(2859): n is a, c, g, or t
  misc_feature (2862)..(2862): n is a, c, g, or t
  misc_feature (2865)..(2865): n is a, c, g, or t
  misc_feature (2868)..(2868): n is a, c, g, or t
  misc_feature (2871)..(2871): n is a, c, g, or t
  misc_feature (2874)..(2874): n is a, c, g, or t
  misc_feature (2877)..(2877): n is a, c, g, or t
  misc_feature (2880)..(2880): n is a, c, g, or t
  misc_feature (2883)..(2883): n is a, c, g, or t
  misc_feature (2886)..(2886): n is a, c, g, or t
  misc_feature (2889)..(2889): n is a, c, g, or t
  misc_feature (2892)..(2892): n is a, c, g, or t
  misc_feature (2895)..(2895): n is a, c, g, or t
  misc_feature (2898)..(2898): n is a, c, g, or t
  misc_feature (2901)..(2901): n is a, c, g, or t
  misc_feature (2904)..(2904): n is a, c, g, or t
  misc_feature (2907)..(2907): n is a, c, g, or t
  misc_feature (2910)..(2910): n is a, c, g, or t
  misc_feature (2913)..(2913): n is a, c, g, or t
  misc_feature (2916)..(2916): n is a, c, g, or t
  misc_feature (2919)..(2919): n is a, c, g, or t
  misc_feature (2928)..(2928): n is a, c, g, or t
  misc_feature (2931)..(2931): n is a, c, g, or t
  misc_feature (2937)..(2937): n is a, c, g, or t
  misc_feature (2940)..(2940): n is a, c, g, or t
  misc_feature (2943)..(2943): n is a, c, g, or t
  misc_feature (2946)..(2946): n is a, c, g, or t
  misc_feature (2949)..(2949): n is a, c, g, or t
  misc_feature (2955)..(2955): n is a, c, g, or t
  misc_feature (2958)..(2958): n is a, c, g, or t
  misc_feature (2961)..(2961): n is a, c, g, or t
  misc_feature (2964)..(2964): n is a, c, g, or t
  misc_feature (2967)..(2967): n is a, c, g, or t
  misc_feature (2970)..(2970): n is a, c, g, or t
  misc_feature (2973)..(2973): n is a, c, g, or t
  misc_feature (2976)..(2976): n is a, c, g, or t
  misc_feature (2979)..(2979): n is a, c, g, or t
  misc_feature (2982)..(2982): n is a, c, g, or t
  misc_feature (2988)..(2988): n is a, c, g, or t
  misc_feature (2991)..(2991): n is a, c, g, or t
  misc_feature (2994)..(2994): n is a, c, g, or t
  misc_feature (2997)..(2997): n is a, c, g, or t
  misc_feature (3000)..(3000): n is a, c, g, or t
  misc_feature (3003)..(3003): n is a, c, g, or t
  misc_feature (3006)..(3006): n is a, c, g, or t
  misc_feature (3009)..(3009): n is a, c, g, or t
  misc_feature (3012)..(3012): n is a, c, g, or t
  misc_feature (3015)..(3015): n is a, c, g, or t
  misc_feature (3018)..(3018): n is a, c, g, or t
  misc_feature (3021)..(3021): n is a, c, g, or t
  misc_feature (3024)..(3024): n is a, c, g, or t
  misc_feature (3027)..(3027): n is a, c, g, or t
  misc_feature (3030)..(3030): n is a, c, g, or t
  misc_feature (3033)..(3033): n is a, c, g, or t
  misc_feature (3036)..(3036): n is a, c, g, or t
  misc_feature (3039)..(3039): n is a, c, g, or t
  misc_feature (3042)..(3042): n is a, c, g, or t
ggnccnatgggnccnwsnggnccnmgnggnytnccnggnccnccnggngcnccnggnccncarggnttycarggnccnccnggngarccnggngarccnggngcnwsnggnccnatgggnccnmgnggnccnccnggnccnccnggnaaraayggngaygayggngargcnggnaarccnggnmgnccnggngarmgnggnccnccnggnccncarggngcnmgnggnytnccnggnacngcnggnytnccnggnatgaarggncaymgnggnttywsnggnytngayggngcnaarggngaygcnggnccngcnggnccnaarggngarccnggnwsnccnggngaraayggngcnccnggncaratgggnccnmgnggnytnccnggngarmgnggnmgnccnggngcnccnggnccngcnggngcnmgnggnaaygayggngcnacnggngcngcnggnccnccnggnccnacnggnccngcnggnccnccnggnttyccnggngcngtnggngcnaarggngargcnggnccncarggnccnmgnggnwsngarggnccncarggngtnmgnggngarccnggnccnccnggnccngcnggngcngcnggnccngcnggnaayccnggngcngayggncarccnggngcnaarggngcnaayggngcnccnggnathgcnggngcnccnggnttyccnggngcnmgnggnccnwsnggnccncarggnccnggnggnccnccnggnccnaarggnaaywsnggngarccnggngcnccnggnwsnaarggngayacnggngcnaarggngarccnggnccngtnggngtncarggnccnccnggnccngcnggngargarggnaarmgnggngcnmgnggngarccnggnccnacnggnytnccnggnccnccnggngarmgnggnggnccnggnwsnmgnggnttyccnggngcngayggngtngcnggnccnaarggnccngcnggngarmgnggnwsnccnggnccngcnggnccnaarggnwsnccnggngargcnggnmgnccnggngargcnggnytnccnggngcnaarggnytnacnggnwsnccnggnwsnccnggnccngayggnaaracnggnccnccnggnccngcnggncargayggnmgnccnggnccnccnggnccnccnggngcnmgnggncargcnggngtnatgggnttyccnggnccnaarggngcngcnggngarccnggnaargcnggngarmgnggngtnccnggnccnccnggngcngtnggnccngcnggnaargayggngargcnggngcncarggnccnccnggnccngcnggnccngcnggngarmgnggngarcarggnccngcnggnwsnccnggnttycarggnytnccnggnccngcnggnccnccnggngargcnggnaarccnggngarcarggngtnccnggngayytnggngcnccnggnccnwsnggngcnmgnggngarmgnggnttyccnggngarmgnggngtncarggnccnccnggnccngcnggnccnmgnggngcnaayggngcnccnggnaaygayggngcnaarggngaygcnggngcnccnggngcnccnggnwsncarggngcnccnggnytncarggnatgccnggngarmgnggngcngcnggnytnccnggnccnaarggngaymgnggngaygcnggnccnaarggngcngayggnwsnccnggnaargayggngtnmgnggnytnacnggnccnathggnccnccnggnccngcnggngcnccnggngayaarggngarwsnggnccnwsnggnccngcnggnccnacnggngcnmgnggngcnccnggngaymgnggngarccnggnccnccnggnccngcnggnttygcnggnccnccnggngcngayggncarccnggngcnaarggngarccnggngaygcnggngcnaarggngaygcnggnccnccnggnccngcnggnccngcnggnccnccnggnccnathggnaaygtnggngcnccnggngcnaarggngcnmgnggnwsngcnggnccnccnggngcnacnggnttyccnggngcngcnggnmgngtnggnccnccnggnccnwsnggnaaygcnggnccnccnggnccnccnggnccngcnggnaargarggnggnaarggnccnmgnggngaracnggnccngcnggnmgnccnggngargtnggnccnccnggnccnccnggnccngcnggngaraarggnwsnccnggngcngayggnccngcnggngcnccnggnacnccnggnccncarggnathgcnggncarmgnggngtngtnggnytnccnggncarmgnggngarmgnggnttyccnggnytnccnggnccnwsnggngarccnggnaarcarggnccnwsnggngcnwsnggngarmgnggnccnccnggnccnatgggnccnccnggnytngcnggnccnccnggngarwsnggnmgngarggngcnccnggngcngarggnwsnccnggnmgngayggnwsnccnggngcnaarggngaymgnggngaracnggnccngcnggnccnccnggngcnccnggngcnccnggngcnccnggnccngtnggnccngcnggnaarwsnggngaymgnggngaracnggnccngcnggnccnacnggnccngtnggnccngtnggngcnmgnggnccngcnggnccncarggnccnmgnggngayaarggngaracnggngarcarggngaymgnggnathaarggncaymgnggnttywsnggnytncarggnccnccnggnccnccnggnwsnccnggngarcarggnccnwsnggngcnwsnggnccngcnggnccnmgnggnccnccnggnwsngcnggngcnccnggnaargayggnytnaayggnytnccnggnccnathggnccnccnggnccnmgnggnmgnacnggngaygcnggnccngtnggnccnccnggnccnccnggnccnccnggnccnccnggnccnccn

SEQ ID NO: 1097 - DNA, 3042 bp, Artificial Sequence
  hCol-CNA02 (alpha2(I) THD)
  misc_feature (3)..(3): n is a, c, g, or t
  misc_feature (6)..(6): n is a, c, g, or t
  misc_feature (12)..(12): n is a, c, g, or t
  misc_feature (15)..(15): n is a, c, g, or t
  misc_feature (21)..(21): n is a, c, g, or t
  misc_feature (24)..(24): n is a, c, g, or t
  misc_feature (27)..(27): n is a, c, g, or t
  misc_feature (30)..(30): n is a, c, g, or t
  misc_feature (33)..(33): n is a, c, g, or t
  misc_feature (36)..(36): n is a, c, g, or t
  misc_feature (39)..(39): n is a, c, g, or t
  misc_feature (42)..(42): n is a, c, g, or t
  misc_feature (45)..(45): n is a, c, g, or t
  misc_feature (48)..(48): n is a, c, g, or t
  misc_feature (51)..(51): n is a, c, g, or t
  misc_feature (54)..(54): n is a, c, g, or t
  misc_feature (57)..(57): n is a, c, g, or t
  misc_feature (60)..(60): n is a, c, g, or t
  misc_feature (66)..(66): n is a, c, g, or t
  misc_feature (75)..(75): n is a, c, g, or t
  misc_feature (78)..(78): n is a, c, g, or t
  misc_feature (81)..(81): n is a, c, g, or t
  misc_feature (84)..(84): n is a, c, g, or t
  misc_feature (90)..(90): n is a, c, g, or t
  misc_feature (93)..(93): n is a, c, g, or t
  misc_feature (99)..(99): n is a, c, g, or t
  misc_feature (102)..(102): n is a, c, g, or t
  misc_feature (108)..(108): n is a, c, g, or t
  misc_feature (111)..(111): n is a, c, g, or t
  misc_feature (114)..(114): n is a, c, g, or t
  misc_feature (117)..(117): n is a, c, g, or t
  misc_feature (120)..(120): n is a, c, g, or t
  misc_feature (123)..(123): n is a, c, g, or t
  misc_feature (126)..(126): n is a, c, g, or t
  misc_feature (129)..(129): n is a, c, g, or t
  misc_feature (132)..(132): n is a, c, g, or t
  misc_feature (135)..(135): n is a, c, g, or t
  misc_feature (138)..(138): n is a, c, g, or t
  misc_feature (141)..(141): n is a, c, g, or t
  misc_feature (144)..(144): n is a, c, g, or t
  misc_feature (147)..(147): n is a, c, g, or t
  misc_feature (153)..(153): n is a, c, g, or t
  misc_feature (156)..(156): n is a, c, g, or t
  misc_feature (165)..(165): n is a, c, g, or t
  misc_feature (171)..(171): n is a, c, g, or t
  misc_feature (174)..(174): n is a, c, g, or t
  misc_feature (180)..(180): n is a, c, g, or t
  misc_feature (183)..(183): n is a, c, g, or t
  misc_feature (186)..(186): n is a, c, g, or t
  misc_feature (189)..(189): n is a, c, g, or t
  misc_feature (192)..(192): n is a, c, g, or t
  misc_feature (198)..(198): n is a, c, g, or t
  misc_feature (201)..(201): n is a, c, g, or t
  misc_feature (204)..(204): n is a, c, g, or t
  misc_feature (207)..(207): n is a, c, g, or t
  misc_feature (210)..(210): n is a, c, g, or t
  misc_feature (213)..(213): n is a, c, g, or t
  misc_feature (219)..(219): n is a, c, g, or t
  misc_feature (222)..(222): n is a, c, g, or t
  misc_feature (225)..(225): n is a, c, g, or t
  misc_feature (228)..(228): n is a, c, g, or t
  misc_feature (234)..(234): n is a, c, g, or t
  misc_feature (237)..(237): n is a, c, g, or t
  misc_feature (240)..(240): n is a, c, g, or t
  misc_feature (243)..(243): n is a, c, g, or t
  misc_feature (246)..(246): n is a, c, g, or t
  misc_feature (249)..(249): n is a, c, g, or t
  misc_feature (252)..(252): n is a, c, g, or t
  misc_feature (255)..(255): n is a, c, g, or t
  misc_feature (264)..(264): n is a, c, g, or t
  misc_feature (270)..(270): n is a, c, g, or t
  misc_feature (273)..(273): n is a, c, g, or t
  misc_feature (282)..(282): n is a, c, g, or t
  misc_feature (285)..(285): n is a, c, g, or t
  misc_feature (291)..(291): n is a, c, g, or t
  misc_feature (294)..(294): n is a, c, g, or t
  misc_feature (300)..(300): n is a, c, g, or t
  misc_feature (306)..(306): n is a, c, g, or t
  misc_feature (309)..(309): n is a, c, g, or t
  misc_feature (312)..(312): n is a, c, g, or t
  misc_feature (315)..(315): n is a, c, g, or t
  misc_feature (318)..(318): n is a, c, g, or t
  misc_feature (321)..(321): n is a, c, g, or t
  misc_feature (327)..(327): n is a, c, g, or t
  misc_feature (333)..(333): n is a, c, g, or t
  misc_feature (336)..(336): n is a, c, g, or t
  misc_feature (339)..(339): n is a, c, g, or t
  misc_feature (342)..(342): n is a, c, g, or t
  misc_feature (345)..(345): n is a, c, g, or t
  misc_feature (354)..(354): n is a, c, g, or t
  misc_feature (357)..(357): n is a, c, g, or t
  misc_feature (360)..(360): n is a, c, g, or t
  misc_feature (363)..(363): n is a, c, g, or t
  misc_feature (369)..(369): n is a, c, g, or t
  misc_feature (372)..(372): n is a, c, g, or t
  misc_feature (375)..(375): n is a, c, g, or t
  misc_feature (378)..(378): n is a, c, g, or t
  misc_feature (381)..(381): n is a, c, g, or t
  misc_feature (384)..(384): n is a, c, g, or t
  misc_feature (387)..(387): n is a, c, g, or t
  misc_feature (390)..(390): n is a, c, g, or t
  misc_feature (396)..(396): n is a, c, g, or t
  misc_feature (399)..(399): n is a, c, g, or t
  misc_feature (402)..(402): n is a, c, g, or t
  misc_feature (405)..(405): n is a, c, g, or t
  misc_feature (408)..(408): n is a, c, g, or t
  misc_feature (411)..(411): n is a, c, g, or t
  misc_feature (414)..(414): n is a, c, g, or t
  misc_feature (417)..(417): n is a, c, g, or t
  misc_feature (420)..(420): n is a, c, g, or t
  misc_feature (423)..(423): n is a, c, g, or t
  misc_feature (426)..(426): n is a, c, g, or t
  misc_feature (429)..(429): n is a, c, g, or t
  misc_feature (432)..(432): n is a, c, g, or t
  misc_feature (435)..(435): n is a, c, g, or t
  misc_feature (438)..(438): n is a, c, g, or t
  misc_feature (444)..(444): n is a, c, g, or t
  misc_feature (447)..(447): n is a, c, g, or t
  misc_feature (450)..(450): n is a, c, g, or t
  misc_feature (453)..(453): n is a, c, g, or t
  misc_feature (456)..(456): n is a, c, g, or t
  misc_feature (459)..(459): n is a, c, g, or t
  misc_feature (462)..(462): n is a, c, g, or t
  misc_feature (465)..(465): n is a, c, g, or t
  misc_feature (468)..(468): n is a, c, g, or t
  misc_feature (471)..(471): n is a, c, g, or t
  misc_feature (474)..(474): n is a, c, g, or t
  misc_feature (480)..(480): n is a, c, g, or t
  misc_feature (483)..(483): n is a, c, g, or t
  misc_feature (486)..(486): n is a, c, g, or t
  misc_feature (489)..(489): n is a, c, g, or t
  misc_feature (492)..(492): n is a, c, g, or t
  misc_feature (495)..(495): n is a, c, g, or t
  misc_feature (498)..(498): n is a, c, g, or t
  misc_feature (504)..(504): n is a, c, g, or t
  misc_feature (507)..(507): n is a, c, g, or t
  misc_feature (510)..(510): n is a, c, g, or t
  misc_feature (513)..(513): n is a, c, g, or t
  misc_feature (516)..(516): n is a, c, g, or t
  misc_feature (519)..(519): n is a, c, g, or t
  misc_feature (525)..(525): n is a, c, g, or t
  misc_feature (534)..(534): n is a, c, g, or t
  misc_feature (537)..(537): n is a, c, g, or t
  misc_feature (540)..(540): n is a, c, g, or t
  misc_feature (543)..(543): n is a, c, g, or t
  misc_feature (549)..(549): n is a, c, g, or t
  misc_feature (552)..(552): n is a, c, g, or t
  misc_feature (555)..(555): n is a, c, g, or t
  misc_feature (558)..(558): n is a, c, g, or t
  misc_feature (561)..(561): n is a, c, g, or t
  misc_feature (564)..(564): n is a, c, g, or t
  misc_feature (567)..(567): n is a, c, g, or t
  misc_feature (570)..(570): n is a, c, g, or t
  misc_feature (573)..(573): n is a, c, g, or t
  misc_feature (576)..(576): n is a, c, g, or t
  misc_feature (579)..(579): n is a, c, g, or t
  misc_feature (585)..(585): n is a, c, g, or t
  misc_feature (588)..(588): n is a, c, g, or t
  misc_feature (591)..(591): n is a, c, g, or t
  misc_feature (594)..(594): n is a, c, g, or t
  misc_feature (597)..(597): n is a, c, g, or t
  misc_feature (600)..(600): n is a, c, g, or t
  misc_feature (603)..(603): n is a, c, g, or t
  misc_feature (606)..(606): n is a, c, g, or t
  misc_feature (609)..(609): n is a, c, g, or t
  misc_feature (612)..(612): n is a, c, g, or t
  misc_feature (615)..(615): n is a, c, g, or t
  misc_feature (618)..(618): n is a, c, g, or t
  misc_feature (621)..(621): n is a, c, g, or t
  misc_feature (624)..(624): n is a, c, g, or t
  misc_feature (630)..(630): n is a, c, g, or t
  misc_feature (633)..(633): n is a, c, g, or t
  misc_feature (636)..(636): n is a, c, g, or t
  misc_feature (642)..(642): n is a, c, g, or t
  misc_feature (645)..(645): n is a, c, g, or t
  misc_feature (648)..(648): n is a, c, g, or t
  misc_feature (651)..(651): n is a, c, g, or t
  misc_feature (654)..(654): n is a, c, g, or t
  misc_feature (660)..(660): n is a, c, g, or t
  misc_feature (663)..(663): n is a, c, g, or t
  misc_feature (666)..(666): n is a, c, g, or t
  misc_feature (669)..(669): n is a, c, g, or t
  misc_feature (672)..(672): n is a, c, g, or t
  misc_feature (675)..(675): n is a, c, g, or t
  misc_feature (678)..(678): n is a, c, g, or t
  misc_feature (681)..(681): n is a, c, g, or t
  misc_feature (684)..(684): n is a, c, g, or t
  misc_feature (687)..(687): n is a, c, g, or t
  misc_feature (690)..(690): n is a, c, g, or t
  misc_feature (693)..(693): n is a, c, g, or t
  misc_feature (696)..(696): n is a, c, g, or t
  misc_feature (699)..(699): n is a, c, g, or t
  misc_feature (702)..(702): n is a, c, g, or t
  misc_feature (705)..(705): n is a, c, g, or t
  misc_feature (708)..(708): n is a, c, g, or t
  misc_feature (711)..(711): n is a, c, g, or t
  misc_feature (714)..(714): n is a, c, g, or t
  misc_feature (720)..(720): n is a, c, g, or t
  misc_feature (723)..(723): n is a, c, g, or t
  misc_feature (726)..(726): n is a, c, g, or t
  misc_feature (729)..(729): n is a, c, g, or t
  misc_feature (732)..(732): n is a, c, g, or t
  misc_feature (735)..(735): n is a, c, g, or t
  misc_feature (738)..(738): n is a, c, g, or t
  misc_feature (741)..(741): n is a, c, g, or t
  misc_feature (744)..(744): n is a, c, g, or t
  misc_feature (747)..(747): n is a, c, g, or t
  misc_feature (750)..(750): n is a, c, g, or t
  misc_feature (753)..(753): n is a, c, g, or t
  misc_feature (756)..(756): n is a, c, g, or t
  misc_feature (759)..(759): n is a, c, g, or t
  misc_feature (762)..(762): n is a, c, g, or t
  misc_feature (765)..(765): n is a, c, g, or t
  misc_feature (768)..(768): n is a, c, g, or t
  misc_feature (774)..(774): n is a, c, g, or t
  misc_feature (777)..(777): n is a, c, g, or t
  misc_feature (780)..(780): n is a, c, g, or t
  misc_feature (783)..(783): n is a, c, g, or t
  misc_feature (786)..(786): n is a, c, g, or t
  misc_feature (789)..(789): n is a, c, g, or t
  misc_feature (795)..(795): n is a, c, g, or t
  misc_feature (801)..(801): n is a, c, g, or t
  misc_feature (804)..(804): n is a, c, g, or t
  misc_feature (813)..(813): n is a, c, g, or t
  misc_feature (819)..(819): n is a, c, g, or t
  misc_feature (822)..(822): n is a, c, g, or t
  misc_feature (825)..(825): n is a, c, g, or t
  misc_feature (828)..(828): n is a, c, g, or t
  misc_feature (831)..(831): n is a, c, g, or t
  misc_feature (834)..(834): n is a, c, g, or t
  misc_feature (840)..(840): n is a, c, g, or t
  misc_feature (843)..(843): n is a, c, g, or t
  misc_feature (846)..(846): n is a, c, g, or t
  misc_feature (849)..(849): n is a, c, g, or t
  misc_feature (852)..(852): n is a, c, g, or t
  misc_feature (855)..(855): n is a, c, g, or t
  misc_feature (858)..(858): n is a, c, g, or t
  misc_feature (867)..(867): n is a, c, g, or t
  misc_feature (873)..(873): n is a, c, g, or t
  misc_feature (876)..(876): n is a, c, g, or t
  misc_feature (879)..(879): n is a, c, g, or t
  misc_feature (885)..(885): n is a, c, g, or t
  misc_feature (891)..(891): n is a, c, g, or t
  misc_feature (894)..(894): n is a, c, g, or t
  misc_feature (897)..(897): n is a, c, g, or t
  misc_feature (900)..(900): n is a, c, g, or t
  misc_feature (903)..(903): n is a, c, g, or t
  misc_feature (906)..(906): n is a, c, g, or t
  misc_feature (909)..(909): n is a, c, g, or t
  misc_feature (912)..(912): n is a, c, g, or t
  misc_feature (915)..(915): n is a, c, g, or t
  misc_feature (918)..(918): n is a, c, g, or t
  misc_feature (921)..(921): n is a, c, g, or t
  misc_feature (924)..(924): n is a, c, g, or t
  misc_feature (927)..(927): n is a, c, g, or t
  misc_feature (930)..(930): n is a, c, g, or t
  misc_feature (933)..(933): n is a, c, g, or t
  misc_feature (936)..(936): n is a, c, g, or t
  misc_feature (939)..(939): n is a, c, g, or t
  misc_feature (942)..(942): n is a, c, g, or t
  misc_feature (945)..(945): n is a, c, g, or t
  misc_feature (948)..(948): n is a, c, g, or t
  misc_feature (951)..(951): n is a, c, g, or t
  misc_feature (954)..(954): n is a, c, g, or t
  misc_feature (957)..(957): n is a, c, g, or t
  misc_feature (960)..(960): n is a, c, g, or t
  misc_feature (966)..(966): n is a, c, g, or t
  misc_feature (969)..(969): n is a, c, g, or t
  misc_feature (972)..(972): n is a, c, g, or t
  misc_feature (975)..(975): n is a, c, g, or t
  misc_feature (978)..(978): n is a, c, g, or t
  misc_feature (984)..(984): n is a, c, g, or t
  misc_feature (987)..(987): n is a, c, g, or t
  misc_feature (990)..(990): n is a, c, g, or t
  misc_feature (993)..(993): n is a, c, g, or t
  misc_feature (996)..(996): n is a, c, g, or t
  misc_feature (999)..(999): n is a, c, g, or t
  misc_feature (1002)..(1002): n is a, c, g, or t
  misc_feature (1005)..(1005): n is a, c, g, or t
  misc_feature (1008)..(1008): n is a, c, g, or t
  misc_feature (1011)..(1011): n is a, c, g, or t
  misc_feature (1014)..(1014): n is a, c, g, or t
  misc_feature (1017)..(1017): n is a, c, g, or t
  misc_feature (1020)..(1020): n is a, c, g, or t
  misc_feature (1023)..(1023): n is a, c, g, or t
  misc_feature (1026)..(1026): n is a, c, g, or t
  misc_feature (1029)..(1029): n is a, c, g, or t
  misc_feature (1032)..(1032): n is a, c, g, or t
  misc_feature (1038)..(1038): n is a, c, g, or t
  misc_feature (1044)..(1044): n is a, c, g, or t
  misc_feature (1047)..(1047): n is a, c, g, or t
  misc_feature (1050)..(1050): n is a, c, g, or t
  misc_feature (1053)..(1053): n is a, c, g, or t
  misc_feature (1056)..(1056): n is a, c, g, or t
  misc_feature (1062)..(1062): n is a, c, g, or t
  misc_feature (1065)..(1065): n is a, c, g, or t
  misc_feature (1068)..(1068): n is a, c, g, or t
  misc_feature (1074)..(1074): n is a, c, g, or t
  misc_feature (1077)..(1077): n is a, c, g, or t
  misc_feature (1080)..(1080): n is a, c, g, or t
  misc_feature (1083)..(1083): n is a, c, g, or t
  misc_feature (1086)..(1086): n is a, c, g, or t
  misc_feature (1089)..(1089): n is a, c, g, or t
  misc_feature (1092)..(1092): n is a, c, g, or t
  misc_feature (1095)..(1095): n is a, c, g, or t
  misc_feature (1098)..(1098): n is a, c, g, or t
  misc_feature (1101)..(1101): n is a, c, g, or t
  misc_feature (1110)..(1110): n is a, c, g, or t
  misc_feature (1113)..(1113): n is a, c, g, or t
  misc_feature (1116)..(1116): n is a, c, g, or t
  misc_feature (1119)..(1119): n is a, c, g, or t
  misc_feature (1128)..(1128): n is a, c, g, or t
  misc_feature (1131)..(1131): n is a, c, g, or t
  misc_feature (1134)..(1134): n is a, c, g, or t
  misc_feature (1137)..(1137): n is a, c, g, or t
  misc_feature (1140)..(1140): n is a, c, g, or t
  misc_feature (1143)..(1143): n is a, c, g, or t
  misc_feature (1146)..(1146): n is a, c, g, or t
  misc_feature (1155)..(1155): n is a, c, g, or t
  misc_feature (1158)..(1158): n is a, c, g, or t
  misc_feature (1161)..(1161): n is a, c, g, or t
  misc_feature (1164)..(1164): n is a, c, g, or t
  misc_feature (1167)..(1167): n is a, c, g, or t
  misc_feature (1173)..(1173): n is a, c, g, or t
  misc_feature (1176)..(1176): n is a, c, g, or t
  misc_feature (1179)..(1179): n is a, c, g, or t
  misc_feature (1182)..(1182): n is a, c, g, or t
  misc_feature (1185)..(1185): n is a, c, g, or t
  misc_feature (1188)..(1188): n is a, c, g, or t
  misc_feature (1191)..(1191): n is a, c, g, or t
  misc_feature (1197)..(1197): n is a, c, g, or t
  misc_feature (1200)..(1200): n is a, c, g, or t
  misc_feature (1209)..(1209): n is a, c, g, or t
  misc_feature (1215)..(1215): n is a, c, g, or t
  misc_feature (1218)..(1218): n is a, c, g, or t
  misc_feature (1221)..(1221): n is a, c, g, or t
  misc_feature (1227)..(1227): n is a, c, g, or t
  misc_feature (1230)..(1230): n is a, c, g, or t
  misc_feature (1233)..(1233): n is a, c, g, or t
  misc_feature (1236)..(1236): n is a, c, g, or t
  misc_feature (1242)..(1242): n is a, c, g, or t
  misc_feature (1245)..(1245): n is a, c, g, or t
  misc_feature (1254)..(1254): n is a, c, g, or t
  misc_feature (1263)..(1263): n is a, c, g, or t
  misc_feature (1269)..(1269): n is a, c, g, or t
  misc_feature (1272)..(1272): n is a, c, g, or t
  misc_feature (1275)..(1275): n is a, c, g, or t
  misc_feature (1278)..(1278): n is a, c, g, or t
  misc_feature (1281)..(1281): n is a, c, g, or t
  misc_feature (1284)..(1284): n is a, c, g, or t
  misc_feature (1287)..(1287): n is a, c, g, or t
  misc_feature (1290)..(1290): n is a, c, g, or t
  misc_feature (1293)..(1293): n is a, c, g, or t
  misc_feature (1296)..(1296): n is a, c, g, or t
  misc_feature (1299)..(1299): n is a, c, g, or t
  misc_feature (1302)..(1302): n is a, c, g, or t
  misc_feature (1308)..(1308): n is a, c, g, or t
  misc_feature (1317)..(1317): n is a, c, g, or t
  misc_feature (1320)..(1320): n is a, c, g, or t
  misc_feature (1326)..(1326): n is a, c, g, or t
  misc_feature (1329)..(1329): n is a, c, g, or t
  misc_feature (1332)..(1332): n is a, c, g, or t
  misc_feature (1335)..(1335): n is a, c, g, or t
  misc_feature (1338)..(1338): n is a, c, g, or t
  misc_feature (1344)..(1344): n is a, c, g, or t
  misc_feature (1347)..(1347): n is a, c, g, or t
  misc_feature (1353)..(1353): n is a, c, g, or t
  misc_feature (1356)..(1356): n is a, c, g, or t
  misc_feature (1362)..(1362): n is a, c, g, or t
  misc_feature (1371)..(1371): n is a, c, g, or t
  misc_feature (1374)..(1374): n is a, c, g, or t
  misc_feature (1377)..(1377): n is a, c, g, or t
  misc_feature (1380)..(1380): n is a, c, g, or t
  misc_feature (1383)..(1383): n is a, c, g, or t
  misc_feature (1386)..(1386): n is a, c, g, or t
  misc_feature (1389)..(1389): n is a, c, g, or t
  misc_feature (1398)..(1398): n is a, c, g, or t
  misc_feature (1401)..(1401): n is a, c, g, or t
  misc_feature (1404)..(1404): n is a, c, g, or t
  misc_feature (1407)..(1407): n is a, c, g, or t
  misc_feature (1410)..(1410): n is a, c, g, or t
  misc_feature (1413)..(1413): n is a, c, g, or t
  misc_feature (1416)..(1416): n is a, c, g, or t
  misc_feature (1419)..(1419): n is a, c, g, or t
  misc_feature (1422)..(1422): n is a, c, g, or t
  misc_feature (1425)..(1425): n is a, c, g, or t
  misc_feature (1431)..(1431): n is a, c, g, or t
  misc_feature (1434)..(1434): n is a, c, g, or t
  misc_feature (1440)..(1440): n is a, c, g, or t
  misc_feature (1443)..(1443): n is a, c, g, or t
  misc_feature (1449)..(1449): n is a, c, g, or t
  misc_feature (1452)..(1452): n is a, c, g, or t
  misc_feature (1455)..(1455): n is a, c, g, or t
  misc_feature (1461)..(1461): n is a, c, g, or t
  misc_feature (1470)..(1470): n is a, c, g, or t
  misc_feature (1473)..(1473): n is a, c, g, or t
  misc_feature (1476)..(1476): n is a, c, g, or t
  misc_feature (1479)..(1479): n is a, c, g, or t
  misc_feature (1482)..(1482): n is a, c, g, or t
  misc_feature (1485)..(1485): n is a, c, g, or t
  misc_feature (1488)..(1488): n is a, c, g, or t
  misc_feature (1491)..(1491): n is a, c, g, or t
  misc_feature (1494)..(1494): n is a, c, g, or t
  misc_feature (1497)..(1497): n is a, c, g, or t
  misc_feature (1503)..(1503): n is a, c, g, or t
  misc_feature (1506)..(1506): n is a, c, g, or t
  misc_feature (1509)..(1509): n is a, c, g, or t
  misc_feature (1512)..(1512): n is a, c, g, or t
  misc_feature (1515)..(1515): n is a, c, g, or t
  misc_feature (1521)..(1521): n is a, c, g, or t
  misc_feature (1524)..(1524): n is a, c, g, or t
  misc_feature (1527)..(1527): n is a, c, g, or t
  misc_feature (1530)..(1530): n is a, c, g, or t
  misc_feature (1533)..(1533): n is a, c, g, or t
  misc_feature (1536)..(1536): n is a, c, g, or t
  misc_feature (1539)..(1539): n is a, c, g, or t
  misc_feature (1542)..(1542): n is a, c, g, or t
  misc_feature (1545)..(1545): n is a, c, g, or t
  misc_feature (1551)..(1551): n is a, c, g, or t
  misc_feature (1554)..(1554): n is a, c, g, or t
  misc_feature (1557)..(1557): n is a, c, g, or t
  misc_feature (1560)..(1560): n is a, c, g, or t
  misc_feature (1563)..(1563): n is a, c, g, or t
  misc_feature (1566)..(1566): n is a, c, g, or t
  misc_feature (1569)..(1569): n is a, c, g, or t
  misc_feature (1572)..(1572): n is a, c, g, or t
  misc_feature (1575)..(1575): n is a, c, g, or t
  misc_feature (1578)..(1578): n is a, c, g, or t
  misc_feature (1581)..(1581): n is a, c, g, or t
  misc_feature (1587)..(1587): n is a, c, g, or t
  misc_feature (1596)..(1596): n is a, c, g, or t
  misc_feature (1602)..(1602): n is a, c, g, or t
  misc_feature (1605)..(1605): n is a, c, g, or t
  misc_feature (1608)..(1608): n is a, c, g, or t
  misc_feature (1611)..(1611): n is a, c, g, or t
  misc_feature (1614)..(1614): n is a, c, g, or t
  misc_feature (1617)..(1617): n is a, c, g, or t
  misc_feature (1620)..(1620): n is a, c, g, or t
  misc_feature (1623)..(1623): n is a, c, g, or t
  misc_feature (1626)..(1626): n is a, c, g, or t
  misc_feature (1629)..(1629): n is a, c, g, or t
  misc_feature (1632)..(1632): n is a, c, g, or t
  misc_feature (1635)..(1635): n is a, c, g, or t
  misc_feature (1638)..(1638): n is a, c, g, or t
  misc_feature (1641)..(1641): n is a, c, g, or t
  misc_feature (1644)..(1644): n is a, c, g, or t
  misc_feature (1647)..(1647): n is a, c, g, or t
  misc_feature (1650)..(1650): n is a, c, g, or t
  misc_feature (1653)..(1653): n is a, c, g, or t
  misc_feature (1656)..(1656): n is a, c, g, or t
  misc_feature (1659)..(1659): n is a, c, g, or t
  misc_feature (1665)..(1665): n is a, c, g, or t
  misc_feature (1668)..(1668): n is a, c, g, or t
  misc_feature (1671)..(1671): n is a, c, g, or t
  misc_feature (1674)..(1674): n is a, c, g, or t
  misc_feature (1677)..(1677): n is a, c, g, or t
  misc_feature (1683)..(1683): n is a, c, g, or t
  misc_feature (1686)..(1686): n is a, c, g, or t
  misc_feature (1689)..(1689): n is a, c, g, or t
  misc_feature (1695)..(1695): n is a, c, g, or t
  misc_feature (1704)..(1704): n is a, c, g, or t
  misc_feature (1710)..(1710): n is a, c, g, or t
  misc_feature (1713)..(1713): n is a, c, g, or t
  misc_feature (1716)..(1716): n is a, c, g, or t
  misc_feature (1719)..(1719): n is a, c, g, or t
  misc_feature (1722)..(1722): n is a, c, g, or t
  misc_feature (1731)..(1731): n is a, c, g, or t
  misc_feature (1737)..(1737): n is a, c, g, or t
  misc_feature (1740)..(1740): n is a, c, g, or t
  misc_feature (1743)..(1743): n is a, c, g, or t
  misc_feature (1749)..(1749): n is a, c, g, or t
  misc_feature (1752)..(1752): n is a, c, g, or t
  misc_feature (1755)..(1755): n is a, c, g, or t
  misc_feature (1758)..(1758): n is a, c, g, or t
  misc_feature (1761)..(1761): n is a, c, g, or t
  misc_feature (1764)..(1764): n is a, c, g, or t
  misc_feature (1767)..(1767): n is a, c, g, or t
  misc_feature (1770)..(1770): n is a, c, g, or t
  misc_feature (1773)..(1773): n is a, c, g, or t
  misc_feature (1776)..(1776): n is a, c, g, or t
  misc_feature (1779)..(1779): n is a, c, g, or t
  misc_feature (1782)..(1782): n is a, c, g, or t
  misc_feature (1785)..(1785): n is a, c, g, or t
  misc_feature (1788)..(1788): n is a, c, g, or t
  misc_feature (1791)..(1791): n is a, c, g, or t
  misc_feature (1794)..(1794): n is a, c, g, or t
  misc_feature (1797)..(1797): n is a, c, g, or t
  misc_feature (1800)..(1800): n is a, c, g, or t
  misc_feature (1803)..(1803): n is a, c, g, or t
  misc_feature (1809)..(1809): n is a, c, g, or t
  misc_feature (1812)..(1812): n is a, c, g, or t
  misc_feature (1818)..(1818): n is a, c, g, or t
  misc_feature (1821)..(1821): n is a, c, g, or t
  misc_feature (1824)..(1824): n is a, c, g, or t
  misc_feature (1827)..(1827): n is a, c, g, or t
  misc_feature (1830)..(1830): n is a, c, g, or t
  misc_feature (1833)..(1833): n is a, c, g, or t
  misc_feature (1836)..(1836): n is a, c, g, or t
  misc_feature (1839)..(1839): n is a, c, g, or t
  misc_feature (1842)..(1842): n is a, c, g, or t
  misc_feature (1845)..(1845): n is a, c, g, or t
  misc_feature (1848)..(1848): n is a, c, g, or t
  misc_feature (1851)..(1851): n is a, c, g, or t
  misc_feature (1854)..(1854): n is a, c, g, or t
  misc_feature (1857)..(1857): n is a, c, g, or t
  misc_feature (1860)..(1860): n is a, c, g, or t
  misc_feature (1863)..(1863): n is a, c, g, or t
  misc_feature (1866)..(1866): n is a, c, g, or t
  misc_feature (1872)..(1872): n is a, c, g, or t
  misc_feature (1875)..(1875): n is a, c, g, or t
  misc_feature (1881)..(1881): n is a, c, g, or t
  misc_feature (1884)..(1884): n is a, c, g, or t
  misc_feature (1887)..(1887): n is a, c, g, or t
  misc_feature (1890)..(1890): n is a, c, g, or t
  misc_feature (1893)..(1893): n is a, c, g, or t
  misc_feature (1896)..(1896): n is a, c, g, or t
  misc_feature (1902)..(1902): n is a, c, g, or t
  misc_feature (1908)..(1908): n is a, c, g, or t
  misc_feature (1911)..(1911): n is a, c, g, or t
  misc_feature (1914)..(1914): n is a, c, g, or t
  misc_feature (1917)..(1917): n is a, c, g, or t
  misc_feature (1920)..(1920): n is a, c, g, or t
  misc_feature (1923)..(1923): n is a, c, g, or t
  misc_feature (1926)..(1926): n is a, c, g, or t
  misc_feature (1929)..(1929): n is a, c, g, or t
  misc_feature (1935)..(1935): n is a, c, g, or t
  misc_feature (1938)..(1938): n is a, c, g, or t
  misc_feature (1941)..(1941): n is a, c, g, or t
  misc_feature (1947)..(1947): n is a, c, g, or t
  misc_feature (1953)..(1953): n is a, c, g, or t
  misc_feature (1956)..(1956): n is a, c, g, or t
  misc_feature (1959)..(1959): n is a, c, g, or t
  misc_feature (1965)..(1965): n is a, c, g, or t
  misc_feature (1968)..(1968): n is a, c, g, or t
  misc_feature (1974)..(1974): n is a, c, g, or t
  misc_feature (1983)..(1983): n is a, c, g, or t
  misc_feature (1986)..(1986): n is a, c, g, or t
  misc_feature (1989)..(1989): n is a, c, g, or t
  misc_feature (1992)..(1992): n is a, c, g, or t
  misc_feature (1995)..(1995): n is a, c, g, or t
  misc_feature (1998)..(1998): n is a, c, g, or t
  misc_feature (2001)..(2001): n is a, c, g, or t
  misc_feature (2004)..(2004): n is a, c, g, or t
  misc_feature (2007)..(2007): n is a, c, g, or t
  misc_feature (2010)..(2010): n is a, c, g, or t
  misc_feature (2013)..(2013): n is a, c, g, or t
  misc_feature (2016)..(2016): n is a, c, g, or t
  misc_feature (2019)..(2019): n is a, c, g, or t
  misc_feature (2022)..(2022): n is a, c, g, or t
  misc_feature (2025)..(2025): n is a, c, g, or t
  misc_feature (2028)..(2028): n is a, c, g, or t
  misc_feature (2031)..(2031): n is a, c, g, or t
  misc_feature (2037)..(2037): n is a, c, g, or t
  misc_feature (2040)..(2040): n is a, c, g, or t
  misc_feature (2043)..(2043): n is a, c, g, or t
  misc_feature (2046)..(2046): n is a, c, g, or t
  misc_feature (2049)..(2049): n is a, c, g, or t
  misc_feature (2052)..(2052): n is a, c, g, or t
  misc_feature (2055)..(2055): n is a, c, g, or t
  misc_feature (2058)..(2058): n is a, c, g, or t
  misc_feature (2061)..(2061): n is a, c, g, or t
  misc_feature (2064)..(2064): n is a, c, g, or t
  misc_feature (2070)..(2070): n is a, c, g, or t
  misc_feature (2073)..(2073): n is a, c, g, or t
  misc_feature (2076)..(2076): n is a, c, g, or t
  misc_feature (2079)..(2079): n is a, c, g, or t
  misc_feature (2082)..(2082): n is a, c, g, or t
  misc_feature (2088)..(2088): n is a, c, g, or t
  misc_feature (2091)..(2091): n is a, c, g, or t
  misc_feature (2097)..(2097): n is a, c, g, or t
  misc_feature (2100)..(2100): n is a, c, g, or t
  misc_feature (2103)..(2103): n is a, c, g, or t
  misc_feature (2106)..(2106): n is a, c, g, or t
  misc_feature (2109)..(2109): n is a, c, g, or t
  misc_feature (2112)..(2112): n is a, c, g, or t
  misc_feature (2115)..(2115): n is a, c, g, or t
  misc_feature (2118)..(2118): n is a, c, g, or t
  misc_feature (2121)..(2121): n is a, c, g, or t
  misc_feature (2124)..(2124): n is a, c, g, or t
  misc_feature (2127)..(2127): n is a, c, g, or t
  misc_feature (2130)..(2130): n is a, c, g, or t
  misc_feature (2133)..(2133): n is a, c, g, or t
  misc_feature (2136)..(2136): n is a, c, g, or t
  misc_feature (2142)..(2142): n is a, c, g, or t
  misc_feature (2145)..(2145): n is a, c, g, or t
  misc_feature (2148)..(2148): n is a, c, g, or t
  misc_feature (2151)..(2151): n is a, c, g, or t
  misc_feature (2154)..(2154): n is a, c, g, or t
  misc_feature (2157)..(2157): n is a, c, g, or t
  misc_feature (2160)..(2160): n is a, c, g, or t
  misc_feature (2163)..(2163): n is a, c, g, or t
  misc_feature (2166)..(2166): n is a, c, g, or t
  misc_feature (2169)..(2169): n is a, c, g, or t
  misc_feature (2172)..(2172): n is a, c, g, or t
  misc_feature (2181)..(2181): n is a, c, g, or t
  misc_feature (2184)..(2184): n is a, c, g, or t
  misc_feature (2187)..(2187): n is a, c, g, or t
  misc_feature (2190)..(2190): n is a, c, g, or t
  misc_feature (2193)..(2193): n is a, c, g, or t
  misc_feature (2196)..(2196): n is a, c, g, or t
  misc_feature (2199)..(2199): n is a, c, g, or t
  misc_feature (2208)..(2208): n is a, c, g, or t
  misc_feature (2211)..(2211): n is a, c, g, or t
  misc_feature (2214)..(2214): n is a, c, g, or t
  misc_feature (2217)..(2217): n is a, c, g, or t
  misc_feature (2220)..(2220): n is a, c, g, or t
  misc_feature (2223)..(2223): n is a, c, g, or t
  misc_feature (2226)..(2226): n is a, c, g, or t
  misc_feature (2232)..(2232): n is a, c, g, or t
  misc_feature (2235)..(2235): n is a, c, g, or t
  misc_feature (2238)..(2238): n is a, c, g, or t
  misc_feature (2241)..(2241): n is a, c, g, or t
  misc_feature (2244)..(2244): n is a, c, g, or t
  misc_feature (2247)..(2247): n is a, c, g, or t
  misc_feature (2250)..(2250): n is a, c, g, or t
  misc_feature (2253)..(2253): n is a, c, g, or t
  misc_feature (2259)..(2259): n is a, c, g, or t
  misc_feature (2262)..(2262): n is a, c, g, or t
  misc_feature (2271)..(2271): n is a, c, g, or t
  misc_feature (2274)..(2274): n is a, c, g, or t
  misc_feature (2277)..(2277): n is a, c, g, or t
  misc_feature (2280)..(2280): n is a, c, g, or t
  misc_feature (2286)..(2286): n is a, c, g, or t
  misc_feature (2289)..(2289): n is a, c, g, or t
  misc_feature (2292)..(2292): n is a, c, g, or t
  misc_feature (2295)..(2295): n is a, c, g, or t
  misc_feature (2298)..(2298): n is a, c, g, or t
  misc_feature (2301)..(2301): n is a, c, g, or t
  misc_feature (2304)..(2304): n is a, c, g, or t
  misc_feature (2307)..(2307): n is a, c, g, or t
  misc_feature (2310)..(2310): n is a, c, g, or t
  misc_feature (2313)..(2313): n is a, c, g, or t
  misc_feature (2316)..(2316): n is a, c, g, or t
  misc_feature (2319)..(2319): n is a, c, g, or t
  misc_feature (2325)..(2325): n is a, c, g, or t
  misc_feature (2328)..(2328): n is a, c, g, or t
  misc_feature (2331)..(2331): n is a, c, g, or t
  misc_feature (2334)..(2334): n is a, c, g, or t
  misc_feature (2337)..(2337): n is a, c, g, or t
  misc_feature (2340)..(2340): n is a, c, g, or t
  misc_feature (2343)..(2343): n is a, c, g, or t
  misc_feature (2349)..(2349): n is a, c, g, or t
  misc_feature (2352)..(2352): n is a, c, g, or t
  misc_feature (2355)..(2355): n is a, c, g, or t
  misc_feature (2358)..(2358): n is a, c, g, or t
  misc_feature (2361)..(2361): n is a, c, g, or t
  misc_feature (2364)..(2364): n is a, c, g, or t
  misc_feature (2367)..(2367): n is a, c, g, or t
  misc_feature (2370)..(2370): n is a, c, g, or t
  misc_feature (2376)..(2376): n is a, c, g, or t
  misc_feature (2379)..(2379): n is a, c, g, or t
  misc_feature (2382)..(2382): n is a, c, g, or t
  misc_feature (2385)..(2385): n is a, c, g, or t
  misc_feature (2388)..(2388): n is a, c, g, or t
  misc_feature (2391)..(2391): n is a, c, g, or t
  misc_feature (2394)..(2394): n is a, c, g, or t
  misc_feature (2397)..(2397): n is a, c, g, or t
  misc_feature (2400)..(2400): n is a, c, g, or t
  misc_feature (2403)..(2403): n is a, c, g, or t
  misc_feature (2406)..(2406): n is a, c, g, or t
  misc_feature (2412)..(2412): n is a, c, g, or t
  misc_feature (2415)..(2415): n is a, c, g, or t
  misc_feature (2418)..(2418): n is a, c, g, or t
  misc_feature (2421)..(2421): n is a, c, g, or t
  misc_feature (2424)..(2424): n is a, c, g, or t
  misc_feature (2430)..(2430): n is a, c, g, or t
  misc_feature (2433)..(2433): n is a, c, g, or t
  misc_feature (2436)..(2436): n is a, c, g, or t
  misc_feature (2439)..(2439): n is a, c, g, or t
  misc_feature (2442)..(2442): n is a, c, g, or t
  misc_feature (2445)..(2445): n is a, c, g, or t
  misc_feature (2448)..(2448): n is a, c, g, or t
  misc_feature (2451)..(2451): n is a, c, g, or t
  misc_feature (2454)..(2454): n is a, c, g, or t
  misc_feature (2457)..(2457): n is a, c, g, or t
  misc_feature (2460)..(2460): n is a, c, g, or t
  misc_feature (2463)..(2463): n is a, c, g, or t
  misc_feature (2466)..(2466): n is a, c, g, or t
  misc_feature (2469)..(2469): n is a, c, g, or t
  misc_feature (2472)..(2472): n is a, c, g, or t
  misc_feature (2475)..(2475): n is a, c, g, or t
  misc_feature (2478)..(2478): n is a, c, g, or t
  misc_feature (2481)..(2481): n is a, c, g, or t
  misc_feature (2487)..(2487): n is a, c, g, or t
  misc_feature (2490)..(2490): n is a, c, g, or t
  misc_feature (2493)..(2493): n is a, c, g, or t
  misc_feature (2496)..(2496): n is a, c, g, or t
  misc_feature (2502)..(2502): n is a, c, g, or t
  misc_feature (2505)..(2505): n is a, c, g, or t
  misc_feature (2508)..(2508): n is a, c, g, or t
  misc_feature (2514)..(2514): n is a, c, g, or t
  misc_feature (2520)..(2520): n is a, c, g, or t
  misc_feature (2523)..(2523): n is a, c, g, or t
  misc_feature (2532)..(2532): n is a, c, g, or t
  misc_feature (2535)..(2535): n is a, c, g, or t
  misc_feature (2538)..(2538): n is a, c, g, or t
  misc_feature (2541)..(2541): n is a, c, g, or t
  misc_feature (2544)..(2544): n is a, c, g, or t
  misc_feature (2550)..(2550): n is a, c, g, or t
  misc_feature (2556)..(2556): n is a, c, g, or t
  misc_feature (2559)..(2559): n is a, c, g, or t
  misc_feature (2568)..(2568): n is a, c, g, or t
  misc_feature (2574)..(2574): n is a, c, g, or t
  misc_feature (2577)..(2577): n is a, c, g, or t
  misc_feature (2583)..(2583): n is a, c, g, or t
  misc_feature (2586)..(2586): n is a, c, g, or t
  misc_feature (2595)..(2595): n is a, c, g, or t
  misc_feature (2598)..(2598): n is a, c, g, or t
  misc_feature (2601)..(2601): n is a, c, g, or t
  misc_feature (2604)..(2604): n is a, c, g, or t
  misc_feature (2607)..(2607): n is a, c, g, or t
  misc_feature (2610)..(2610): n is a, c, g, or t
  misc_feature (2613)..(2613): n is a, c, g, or t
  misc_feature (2616)..(2616): n is a, c, g, or t
  misc_feature (2619)..(2619): n is a, c, g, or t
  misc_feature (2622)..(2622): n is a, c, g, or t
  misc_feature (2625)..(2625): n is a, c, g, or t
  misc_feature (2631)..(2631): n is a, c, g, or t
  misc_feature (2634)..(2634): n is a, c, g, or t
  misc_feature (2637)..(2637): n is a, c, g, or t
  misc_feature (2640)..(2640): n is a, c, g, or t
  misc_feature (2643)..(2643): n is a, c, g, or t
  misc_feature (2646)..(2646): n is a, c, g, or t
  misc_feature (2649)..(2649): n is a, c, g, or t
  misc_feature (2658)..(2658): n is a, c, g, or t
  misc_feature (2664)..(2664): n is a, c, g, or t
  misc_feature (2667)..(2667): n is a, c, g, or t
  misc_feature (2673)..(2673): n is a, c, g, or t
  misc_feature (2676)..(2676): n is a, c, g, or t
  misc_feature (2679)..(2679): n is a, c, g, or t
  misc_feature (2682)..(2682): n is a, c, g, or t
  misc_feature (2685)..(2685): n is a, c, g, or t
  misc_feature (2688)..(2688): n is a, c, g, or t
  misc_feature (2691)..(2691): n is a, c, g, or t
  misc_feature (2694)..(2694): n is a, c, g, or t
  misc_feature (2697)..(2697): n is a, c, g, or t
  misc_feature (2700)..(2700): n is a, c, g, or t
  misc_feature (2703)..(2703): n is a, c, g, or t
  misc_feature (2706)..(2706): n is a, c, g, or t
  misc_feature (2709)..(2709): n is a, c, g, or t
  misc_feature (2712)..(2712): n is a, c, g, or t
  misc_feature (2715)..(2715): n is a, c, g, or t
  misc_feature (2718)..(2718): n is a, c, g, or t
  misc_feature (2721)..(2721): n is a, c, g, or t
  misc_feature (2724)..(2724): n is a, c, g, or t
  misc_feature (2727)..(2727): n is a, c, g, or t
  misc_feature (2730)..(2730): n is a, c, g, or t
  misc_feature (2733)..(2733): n is a, c, g, or t
  misc_feature (2739)..(2739): n is a, c, g, or t
  misc_feature (2745)..(2745): n is a, c, g, or t
  misc_feature (2748)..(2748): n is a, c, g, or t
  misc_feature (2757)..(2757): n is a, c, g, or t
  misc_feature (2763)..(2763): n is a, c, g, or t
  misc_feature (2766)..(2766): n is a, c, g, or t
  misc_feature (2775)..(2775): n is a, c, g, or t
  misc_feature (2778)..(2778): n is a, c, g, or t
  misc_feature (2781)..(2781): n is a, c, g, or t
  misc_feature (2784)..(2784): n is a, c, g, or t
  misc_feature (2787)..(2787): n is a, c, g, or t
  misc_feature (2790)..(2790): n is a, c, g, or t
  misc_feature (2793)..(2793): n is a, c, g, or t
  misc_feature (2796)..(2796): n is a, c, g, or t
  misc_feature (2802)..(2802): n is a, c, g, or t
  misc_feature (2811)..(2811): n is a, c, g, or t
  misc_feature (2814)..(2814): n is a, c, g, or t
  misc_feature (2820)..(2820): n is a, c, g, or t
  misc_feature (2823)..(2823): n is a, c, g, or t
  misc_feature (2826)..(2826): n is a, c, g, or t
  misc_feature (2829)..(2829): n is a, c, g, or t
  misc_feature (2835)..(2835): n is a, c, g, or t
  misc_feature (2838)..(2838): n is a, c, g, or t
  misc_feature (2847)..(2847): n is a, c, g, or t
  misc_feature (2856)..(2856): n is a, c, g, or t
  misc_feature (2859)..(2859): n is a, c, g, or t
  misc_feature (2862)..(2862): n is a, c, g, or t
  misc_feature (2865)..(2865): n is a, c, g, or t
  misc_feature (2868)..(2868): n is a, c, g, or t
  misc_feature (2871)..(2871): n is a, c, g, or t
  misc_feature (2874)..(2874): n is a, c, g, or t
  misc_feature (2877)..(2877): n is a, c, g, or t
  misc_feature (2880)..(2880): n is a, c, g, or t
  misc_feature (2883)..(2883): n is a, c, g, or t
  misc_feature (2886)..(2886): n is a, c, g, or t
  misc_feature (2889)..(2889): n is a, c, g, or t
  misc_feature (2892)..(2892): n is a, c, g, or t
  misc_feature (2895)..(2895): n is a, c, g, or t
  misc_feature (2898)..(2898): n is a, c, g, or t
  misc_feature (2901)..(2901): n is a, c, g, or t
  misc_feature (2904)..(2904): n is a, c, g, or t
  misc_feature (2907)..(2907): n is a, c, g, or t
  misc_feature (2910)..(2910): n is a, c, g, or t
  misc_feature (2913)..(2913): n is a, c, g, or t
  misc_feature (2916)..(2916): n is a, c, g, or t
  misc_feature (2919)..(2919): n is a, c, g, or t
  misc_feature (2928)..(2928): n is a, c, g, or t
  misc_feature (2931)..(2931): n is a, c, g, or t
  misc_feature (2934)..(2934): n is a, c, g, or t
  misc_feature (2937)..(2937): n is a, c, g, or t
  misc_feature (2943)..(2943): n is a, c, g, or t
  misc_feature (2946)..(2946): n is a, c, g, or t
  misc_feature (2949)..(2949): n is a, c, g, or t
  misc_feature (2952)..(2952): n is a, c, g, or t
  misc_feature (2955)..(2955): n is a, c, g, or t
  misc_feature (2958)..(2958): n is a, c, g, or t
  misc_feature (2961)..(2961): n is a, c, g, or t
  misc_feature (2964)..(2964): n is a, c, g, or t
  misc_feature (2970)..(2970): n is a, c, g, or t
  misc_feature (2973)..(2973): n is a, c, g, or t
  misc_feature (2976)..(2976): n is a, c, g, or t
  misc_feature (2982)..(2982): n is a, c, g, or t
  misc_feature (2991)..(2991): n is a, c, g, or t
  misc_feature (2994)..(2994): n is a, c, g, or t
  misc_feature (2997)..(2997): n is a, c, g, or t
  misc_feature (3000)..(3000): n is a, c, g, or t
  misc_feature (3003)..(3003): n is a, c, g, or t
  misc_feature (3006)..(3006): n is a, c, g, or t
  misc_feature (3009)..(3009): n is a, c, g, or t
  misc_feature (3012)..(3012): n is a, c, g, or t
  misc_feature (3015)..(3015): n is a, c, g, or t
  misc_feature (3018)..(3018): n is a, c, g, or t
  misc_feature (3021)..(3021): n is a, c, g, or t
  misc_feature (3024)..(3024): n is a, c, g, or t
  misc_feature (3027)..(3027): n is a, c, g, or t
  misc_feature (3030)..(3030): n is a, c, g, or t
  misc_feature (3033)..(3033): n is a, c, g, or t
  misc_feature (3036)..(3036): n is a, c, g, or t
  misc_feature (3039)..(3039): n is a, c, g, or t
  misc_feature (3042)..(3042): n is a, c, g, or t
ggnccnatgggnytnatgggnccnmgnggnccnccnggngcngcnggngcnccnggnccncarggnttycarggnccngcnggngarccnggngarccnggncaracnggnccngcnggngcnmgnggnccngcnggnccnccnggnaargcnggngargayggncayccnggnaarccnggnmgnccnggngarmgnggngtngtnggnccncarggngcnmgnggnttyccnggnacnccnggnytnccnggnttyaarggnathmgnggncayaayggnytngayggnytnaarggncarccnggngcnccnggngtnaarggngarccnggngcnccnggngaraayggnacnccnggncaracnggngcnmgnggnytnccnggngarmgnggnmgngtnggngcnccnggnccngcnggngcnmgnggnwsngayggnwsngtnggnccngtnggnccngcnggnccnathggnwsngcnggnccnccnggnttyccnggngcnccnggnccnaarggngarathggngcngtnggnaaygcnggnccngcnggnccngcnggnccnmgnggngargtnggnytnccnggnytnwsnggnccngtnggnccnccnggnaayccnggngcnaayggnytnacnggngcnaarggngcngcnggnytnccnggngtngcnggngcnccnggnytnccnggnccnmgnggnathccnggnccngtnggngcngcnggngcnacnggngcnmgnggnytngtnggngarccnggnccngcnggnwsnaarggngarwsnggnaayaarggngarccnggnwsngcnggnccncarggnccnccnggnccnwsnggngargarggnaarmgnggnccnaayggngargcnggnwsngcnggnccnccnggnccnccnggnytnmgnggnwsnccnggnwsnmgnggnytnccnggngcngayggnmgngcnggngtnatgggnccnccnggnwsnmgnggngcnwsnggnccngcnggngtnmgnggnccnaayggngaygcnggnmgnccnggngarccnggnytnatgggnccnmgnggnytnccnggnwsnccnggnaayathggnccngcnggnaargarggnccngtnggnytnccnggnathgayggnmgnccnggnccnathggnccngcnggngcnmgnggngarccnggnaayathggnttyccnggnccnaarggnccnacnggngayccnggnaaraayggngayaarggncaygcnggnytngcnggngcnmgnggngcnccnggnccngayggnaayaayggngcncarggnccnccnggnccncarggngtncarggnggnaarggngarcarggnccnccnggnccnccnggnttycarggnytnccnggnccnwsnggnccngcnggngargtnggnaarccnggngarmgnggnytncayggngarttyggnytnccnggnccngcnggnccnmgnggngarmgnggnccnccnggngarwsnggngcngcnggnccnacnggnccnathggnwsnmgnggnccnwsnggnccnccnggnccngayggnaayaarggngarccnggngtngtnggngcngtnggnacngcnggnccnwsnggnccnwsnggnytnccnggngarmgnggngcngcnggnathccnggnggnaarggngaraarggngarccnggnytnmgnggngarathggnaayccnggnmgngayggngcnmgnggngcnccnggngcngtnggngcnccnggnccngcnggngcnacnggngaymgnggngargcnggngcngcnggnccngcnggnccngcnggnccnmgnggnwsnccnggngarmgnggngargtnggnccngcnggnccnaayggnttygcnggnccngcnggngcngcnggncarccnggngcnaarggngarmgnggngcnaarggnccnaarggngaraayggngtngtnggnccnacnggnccngtnggngcngcnggnccngcnggnccnaayggnccnccnggnccngcnggnwsnmgnggngayggnggnccnccnggnatgacnggnttyccnggngcngcnggnmgnacnggnccnccnggnccnwsnggnathwsnggnccnccnggnccnccnggnccngcnggnaargarggnytnmgnggnccnmgnggngaycarggnccngtnggnmgnacnggngargtnggngcngtnggnccnccnggnttygcnggngaraarggnccnwsnggngargcnggnacngcnggnccnccnggnacnccnggnccncarggnytnytnggngcnccnggnathytnggnytnccnggnwsnmgnggngarmgnggnytnccnggngtngcnggngcngtnggngarccnggnccnytnggnathgcnggnccnccnggngcnmgnggnccnccnggngcngtnggnwsnccnggngtnaayggngcnccnggngargcnggnmgngayggnaayccnggnaaygayggnccnccnggnmgngayggncarccnggncayaarggngarmgnggntayccnggnaayathggnccngtnggngcngcnggngcnccnggnccncayggnccngtnggnccngcnggnaarcayggnaaymgnggngaracnggnccnwsnggnccngtnggnccngcnggngcngtnggnccnmgnggnccnwsnggnccncarggnathmgnggngayaarggngarccnggngaraarggnccnmgnggnytnccnggnytnaarggncayaayggnytncarggnytnccnggnathgcnggncaycayggngaycarggngcnccnggnwsngtnggnccngcnggnccnmgnggnccngcnggnccnwsnggnccngcnggnaargayggnmgnacnggncayccnggnacngtnggnccngcnggnathmgnggnccncarggncaycarggnccngcnggnccnccnggnccnccnggnccnccnggnccnccnggngtnwsn

SEQ ID NO: 1098 - DNA, 3042 bp, Artificial Sequence
  hCol-CNA03 (alpha1(II) THD)
  misc_feature (3)..(3): n is a, c, g, or t
  misc_feature (6)..(6): n is a, c, g, or t
  misc_feature (12)..(12): n is a, c, g, or t
  misc_feature (15)..(15): n is a, c, g, or t
  misc_feature (21)..(21): n is a, c, g, or t
  misc_feature (24)..(24): n is a, c, g, or t
  misc_feature (27)..(27): n is a, c, g, or t
  misc_feature (30)..(30): n is a, c, g, or t
  misc_feature (33)..(33): n is a, c, g, or t
  misc_feature (36)..(36): n is a, c, g, or t
  misc_feature (39)..(39): n is a, c, g, or t
  misc_feature (42)..(42): n is a, c, g, or t
  misc_feature (45)..(45): n is a, c, g, or t
  misc_feature (48)..(48): n is a, c, g, or t
  misc_feature (51)..(51): n is a, c, g, or t
  misc_feature (54)..(54): n is a, c, g, or t
  misc_feature (57)..(57): n is a, c, g, or t
  misc_feature (60)..(60): n is a, c, g, or t
  misc_feature (66)..(66): n is a, c, g, or t
  misc_feature (75)..(75): n is a, c, g, or t
  misc_feature (81)..(81): n is a, c, g, or t
  misc_feature (84)..(84): n is a, c, g, or t
  misc_feature (90)..(90): n is a, c, g, or t
  misc_feature (93)..(93): n is a, c, g, or t
  misc_feature (99)..(99): n is a, c, g, or t
  misc_feature (102)..(102): n is a, c, g, or t
  misc_feature (105)..(105): n is a, c, g, or t
  misc_feature (108)..(108): n is a, c, g, or t
  misc_feature (111)..(111): n is a, c, g, or t
  misc_feature (114)..(114): n is a, c, g, or t
  misc_feature (120)..(120): n is a, c, g, or t
  misc_feature (123)..(123): n is a, c, g, or t
  misc_feature (126)..(126): n is a, c, g, or t
  misc_feature (129)..(129): n is a, c, g, or t
  misc_feature (132)..(132): n is a, c, g, or t
  misc_feature (135)..(135): n is a, c, g, or t
  misc_feature (138)..(138): n is a, c, g, or t
  misc_feature (141)..(141): n is a, c, g, or t
  misc_feature (144)..(144): n is a, c, g, or t
  misc_feature (147)..(147): n is a, c, g, or t
  misc_feature (153)..(153): n is a, c, g, or t
  misc_feature (156)..(156): n is a, c, g, or t
  misc_feature (165)..(165): n is a, c, g, or t
  misc_feature (171)..(171): n is a, c, g, or t
  misc_feature (174)..(174): n is a, c, g, or t
  misc_feature (180)..(180): n is a, c, g, or t
  misc_feature (183)..(183): n is a, c, g, or t
  misc_feature (189)..(189): n is a, c, g, or t
  misc_feature (192)..(192): n is a, c, g, or t
  misc_feature (198)..(198): n is a, c, g, or t
  misc_feature (201)..(201): n is a, c, g, or t
  misc_feature (204)..(204): n is a, c, g, or t
  misc_feature (207)..(207): n is a, c, g, or t
  misc_feature (210)..(210): n is a, c, g, or t
  misc_feature (213)..(213): n is a, c, g, or t
  misc_feature (219)..(219): n is a, c, g, or t
  misc_feature (222)..(222): n is a, c, g, or t
  misc_feature (225)..(225): n is a, c, g, or t
  misc_feature (228)..(228): n is a, c, g, or t
  misc_feature (234)..(234): n is a, c, g, or t
  misc_feature (237)..(237): n is a, c, g, or t
  misc_feature (240)..(240): n is a, c, g, or t
  misc_feature (243)..(243): n is a, c, g, or t
  misc_feature (246)..(246): n is a, c, g, or t
  misc_feature (249)..(249): n is a, c, g, or t
  misc_feature (252)..(252): n is a, c, g, or t
  misc_feature (255)..(255): n is a, c, g, or t
  misc_feature (258)..(258): n is a, c, g, or t
  misc_feature (264)..(264): n is a, c, g, or t
  misc_feature (270)..(270): n is a, c, g, or t
  misc_feature (273)..(273): n is a, c, g, or t
  misc_feature (279)..(279): n is a, c, g, or t
  misc_feature (282)..(282): n is a, c, g, or t
  misc_feature (285)..(285): n is a, c, g, or t
  misc_feature (291)..(291): n is a, c, g, or t
  misc_feature (294)..(294): n is a, c, g, or t
  misc_feature (300)..(300): n is a, c, g, or t
  misc_feature (306)..(306): n is a, c, g, or t
  misc_feature (309)..(309): n is a, c, g, or t
  misc_feature (312)..(312): n is a, c, g, or t
  misc_feature (315)..(315): n is a, c, g, or t
  misc_feature (318)..(318): n is a, c, g, or t
  misc_feature (321)..(321): n is a, c, g, or t
  misc_feature (327)..(327): n is a, c, g, or t
  misc_feature (333)..(333): n is a, c, g, or t
  misc_feature (336)..(336): n is a, c, g, or t
  misc_feature (339)..(339): n is a, c, g, or t
  misc_feature (342)..(342): n is a, c, g, or t
  misc_feature (345)..(345): n is a, c, g, or t
  misc_feature (354)..(354): n is a, c, g, or t
  misc_feature (357)..(357): n is a, c, g, or t
  misc_feature (360)..(360): n is a, c, g, or t
  misc_feature (363)..(363): n is a, c, g, or t
  misc_feature (366)..(366): n is a, c, g, or t
  misc_feature (372)..(372): n is a, c, g, or t
  misc_feature (375)..(375): n is a, c, g, or t
  misc_feature (378)..(378): n is a, c, g, or t
  misc_feature (381)..(381): n is a, c, g, or t
  misc_feature (384)..(384): n is a, c, g, or t
  misc_feature (387)..(387): n is a, c, g, or t
  misc_feature (390)..(390): n is a, c, g, or t
  misc_feature (396)..(396): n is a, c, g, or t
  misc_feature (399)..(399): n is a, c, g, or t
  misc_feature (402)..(402): n is a, c, g, or t
  misc_feature (405)..(405): n is a, c, g, or t
  misc_feature (408)..(408): n is a, c, g, or t
  misc_feature (411)..(411): n is a, c, g, or t
  misc_feature (414)..(414): n is a, c, g, or t
  misc_feature (417)..(417): n is a, c, g, or t
  misc_feature (420)..(420): n is a, c, g, or t
  misc_feature (423)..(423): n is a, c, g, or t
  misc_feature (426)..(426): n is a, c, g, or t
  misc_feature (429)..(429): n is a, c, g, or t
  misc_feature (432)..(432): n is a, c, g, or t
  misc_feature (435)..(435): n is a, c, g, or t
  misc_feature (444)..(444): n is a, c, g, or t
  misc_feature (450)..(450): n is a, c, g, or t
  misc_feature (453)..(453): n is a, c, g, or t
  misc_feature (456)..(456): n is a, c, g, or t
  misc_feature (459)..(459): n is a, c, g, or t
  misc_feature (462)..(462): n is a, c, g, or t
  misc_feature (465)..(465): n is a, c, g, or t
  misc_feature (468)..(468): n is a, c, g, or t
  misc_feature (471)..(471): n is a, c, g, or t
  misc_feature (474)..(474): n is a, c, g, or t
  misc_feature (477)..(477): n is a, c, g, or t
  misc_feature (480)..(480): n is a, c, g, or t
  misc_feature (483)..(483): n is a, c, g, or t
  misc_feature (486)..(486): n is a, c, g, or t
  misc_feature (489)..(489): n is a, c, g, or t
  misc_feature (492)..(492): n is a, c, g, or t
  misc_feature (495)..(495): n is a, c, g, or t
  misc_feature (498)..(498): n is a, c, g, or t
  misc_feature (504)..(504): n is a, c, g, or t
  misc_feature (507)..(507): n is a, c, g, or t
  misc_feature (510)..(510): n is a, c, g, or t
  misc_feature (513)..(513): n is a, c, g, or t
  misc_feature (516)..(516): n is a, c, g, or t
  misc_feature (519)..(519): n is a, c, g, or t
  misc_feature (525)..(525): n is a, c, g, or t
  misc_feature (531)..(531): n is a, c, g, or t
  misc_feature (534)..(534): n is a, c, g, or t
  misc_feature (537)..(537): n is a, c, g, or t
  misc_feature (540)..(540): n is a, c, g, or t
  misc_feature (543)..(543): n is a, c, g, or t
  misc_feature (546)..(546): n is a, c, g, or t
  misc_feature (549)..(549): n is a, c, g, or t
  misc_feature (552)..(552): n is a, c, g, or t
  misc_feature (555)..(555): n is a, c, g, or t
  misc_feature (561)..(561): n is a, c, g, or t
  misc_feature (564)..(564): n is a, c, g, or t
  misc_feature (570)..(570): n is a, c, g, or t
  misc_feature (573)..(573): n is a, c, g, or t
  misc_feature (576)..(576): n is a, c, g, or t
  misc_feature (579)..(579): n is a, c, g, or t
  misc_feature (585)..(585): n is a, c, g, or t
  misc_feature (588)..(588): n is a, c, g, or t
  misc_feature (591)..(591): n is a, c, g, or t
  misc_feature (594)..(594): n is a, c, g, or t
  misc_feature (597)..(597): n is a, c, g, or t
  misc_feature (600)..(600): n is a, c, g, or t
  misc_feature (603)..(603): n is a, c, g, or t
  misc_feature (606)..(606): n is a, c, g, or t
  misc_feature (609)..(609): n is a, c, g, or t
  misc_feature (612)..(612): n is a, c, g, or t
  misc_feature (615)..(615): n is a, c, g, or t
  misc_feature (618)..(618): n is a, c, g, or t
  misc_feature (621)..(621): n is a, c, g, or t
  misc_feature (624)..(624): n is a, c, g, or t
  misc_feature (630)..(630): n is a, c, g, or t
  misc_feature (633)..(633): n is a, c, g, or t
  misc_feature (636)..(636): n is a, c, g, or t
  misc_feature (642)..(642): n is a, c, g, or t
  misc_feature (648)..(648): n is a, c, g, or t
  misc_feature (651)..(651): n is a, c, g, or t
  misc_feature (654)..(654): n is a, c, g, or t
  misc_feature (660)..(660): n is a, c, g, or t
  misc_feature (663)..(663): n is a, c, g, or t
  misc_feature (666)..(666): n is a, c, g, or t
  misc_feature (669)..(669): n is a, c, g, or t
  misc_feature (672)..(672): n is a, c, g, or t
  misc_feature (675)..(675): n is a, c, g, or t
  misc_feature (678)..(678): n is a, c, g, or t
  misc_feature (684)..(684): n is a, c, g, or t
  misc_feature (687)..(687): n is a, c, g, or t
  misc_feature (690)..(690): n is a, c, g, or t
  misc_feature (693)..(693): n is a, c, g, or t
  misc_feature (696)..(696): n is a, c, g, or t
  misc_feature (702)..(702): n is a, c, g, or t
  misc_feature (705)..(705): n is a, c, g, or t
  misc_feature (708)..(708): n is a, c, g, or t
  misc_feature (711)..(711): n is a, c, g, or t
  misc_feature (714)..(714): n is a, c, g, or t
  misc_feature (717)..(717): n is a, c, g, or t
  misc_feature (720)..(720): n is a, c, g, or t
  misc_feature (723)..(723): n is a, c, g, or t
  misc_feature (726)..(726): n is a, c, g, or t
  misc_feature (732)..(732): n is a, c, g, or t
  misc_feature (735)..(735): n is a, c, g, or t
  misc_feature (738)..(738): n is a, c, g, or t
  misc_feature (741)..(741): n is a, c, g, or t
  misc_feature (744)..(744): n is a, c, g, or t
  misc_feature (747)..(747): n is a, c, g, or t
  misc_feature (750)..(750): n is a, c, g, or t
  misc_feature (753)..(753): n is a, c, g, or t
  misc_feature (759)..(759): n is a, c, g, or t
  misc_feature (765)..(765): n is a, c, g, or t
  misc_feature (768)..(768): n is a, c, g, or t
  misc_feature (774)..(774): n is a, c, g, or t
  misc_feature (777)..(777): n is a, c, g, or t
  misc_feature (783)..(783): n is a, c, g, or t
  misc_feature (786)..(786): n is a, c, g, or t
  misc_feature (795)..(795): n is a, c, g, or t
  misc_feature (804)..(804): n is a, c, g, or t
  misc_feature (807)..(807): n is a, c, g, or t
  misc_feature (813)..(813): n is a, c, g, or t
  misc_feature (819)..(819): n is a, c, g, or t
  misc_feature (822)..(822): n is a, c, g, or t
  misc_feature (825)..(825): n is a, c, g, or t
  misc_feature (828)..(828): n is a, c, g, or t
  misc_feature (831)..(831): n is a, c, g, or t
  misc_feature (834)..(834): n is a, c, g, or t
  misc_feature (840)..(840): n is a, c, g, or t
  misc_feature (843)..(843): n is a, c, g, or t
  misc_feature (846)..(846): n is a, c, g, or t
  misc_feature (849)..(849): n is a, c, g, or t
  misc_feature (852)..(852): n is a, c, g, or t
  misc_feature (855)..(855): n is a, c, g, or t
  misc_feature (858)..(858): n is a, c, g, or t
  misc_feature (867)..(867): n is a, c, g, or t
  misc_feature (873)..(873): n is a, c, g, or t
  misc_feature (876)..(876): n is a, c, g, or t
  misc_feature (879)..(879): n is a, c, g, or t
  misc_feature (882)..(882): n is a, c, g, or t
  misc_feature (885)..(885): n is a, c, g, or t
  misc_feature (891)..(891): n is a, c, g, or t
  misc_feature (894)..(894): n is a, c, g, or t
  misc_feature (897)..(897): n is a, c, g, or t
  misc_feature (900)..(900): n is a, c, g, or t
  misc_feature (903)..(903): n is a, c, g, or t
  misc_feature (906)..(906): n is a, c, g, or t
  misc_feature (912)..(912): n is a, c, g, or t
  misc_feature (915)..(915): n is a, c, g, or t
  misc_feature (918)..(918): n is a, c, g, or t
  misc_feature (921)..(921): n is a, c, g, or t
  misc_feature (927)..(927): n is a, c, g, or t
  misc_feature (930)..(930): n is a, c, g, or t
  misc_feature (933)..(933): n is a, c, g, or t
  misc_feature (936)..(936): n is a, c, g, or t
  misc_feature (939)..(939): n is a, c, g, or t
  misc_feature (945)..(945): n is a, c, g, or t
  misc_feature (948)..(948): n is a, c, g, or t
  misc_feature (954)..(954): n is a, c, g, or t
  misc_feature (957)..(957): n is a, c, g, or t
  misc_feature (966)..(966): n is a, c, g, or t
  misc_feature (969)..(969): n is a, c, g, or t
  misc_feature (972)..(972): n is a, c, g, or t
  misc_feature (975)..(975): n is a, c, g, or t
  misc_feature (978)..(978): n is a, c, g, or t
  misc_feature (984)..(984): n is a, c, g, or t
  misc_feature (987)..(987): n is a, c, g, or t
  misc_feature (990)..(990): n is a, c, g, or t
  misc_feature (993)..(993): n is a, c, g, or t
  misc_feature (999)..(999): n is a, c, g, or t
  misc_feature (1002)..(1002): n is a, c, g, or t
  misc_feature (1005)..(1005): n is a, c, g, or t
  misc_feature (1008)..(1008): n is a, c, g, or t
  misc_feature (1011)..(1011): n is a, c, g, or t
  misc_feature (1014)..(1014): n is a, c, g, or t
  misc_feature (1017)..(1017): n is a, c, g, or t
  misc_feature (1020)..(1020): n is a, c, g, or t
  misc_feature (1023)..(1023): n is a, c, g, or t
  misc_feature (1029)..(1029): n is a, c, g, or t
  misc_feature (1032)..(1032): n is a, c, g, or t
  misc_feature (1038)..(1038): n is a, c, g, or t
  misc_feature (1044)..(1044): n is a, c, g, or t
  misc_feature (1047)..(1047): n is a, c, g, or t
  misc_feature (1050)..(1050): n is a, c, g, or t
  misc_feature (1053)..(1053): n is a, c, g, or t
  misc_feature (1056)..(1056): n is a, c, g, or t
  misc_feature (1062)..(1062): n is a, c, g, or t
  misc_feature (1065)..(1065): n is a, c, g, or t
  misc_feature (1068)..(1068): n is a, c, g, or t
  misc_feature (1071)..(1071): n is a, c, g, or t
  misc_feature (1074)..(1074): n is a, c, g, or t
  misc_feature (1077)..(1077): n is a, c, g, or t
  misc_feature (1080)..(1080): n is a, c, g, or t
  misc_feature (1083)..(1083): n is a, c, g, or t
  misc_feature (1086)..(1086): n is a, c, g, or t
  misc_feature (1089)..(1089): n is a, c, g, or t
  misc_feature (1092)..(1092): n is a, c, g, or t
  misc_feature (1095)..(1095): n is a, c, g, or t
  misc_feature (1098)..(1098): n is a, c, g, or t
  misc_feature (1101)..(1101): n is a, c, g, or t
  misc_feature (1107)..(1107): n is a, c, g, or t
  misc_feature (1110)..(1110): n is a, c, g, or t
  misc_feature (1113)..(1113): n is a, c, g, or t
  misc_feature (1119)..(1119): n is a, c, g, or t
  misc_feature (1125)..(1125): n is a, c, g, or t
  misc_feature (1128)..(1128): n is a, c, g, or t
  misc_feature (1131)..(1131): n is a, c, g, or t
  misc_feature (1134)..(1134): n is a, c, g, or t
  misc_feature (1137)..(1137): n is a, c, g, or t
  misc_feature (1140)..(1140): n is a, c, g, or t
  misc_feature (1143)..(1143): n is a, c, g, or t
  misc_feature (1146)..(1146): n is a, c, g, or t
  misc_feature (1155)..(1155): n is a, c, g, or t
  misc_feature (1158)..(1158): n is a, c, g, or t
  misc_feature (1161)..(1161): n is a, c, g, or t
  misc_feature (1164)..(1164): n is a, c, g, or t
  misc_feature (1167)..(1167): n is a, c, g, or t
  misc_feature (1170)..(1170): n is a, c, g, or t
  misc_feature (1173)..(1173): n is a, c, g, or t
  misc_feature (1176)..(1176): n is a, c, g, or t
  misc_feature (1182)..(1182): n is a, c, g, or t
  misc_feature (1185)..(1185): n is a, c, g, or t
  misc_feature (1188)..(1188): n is a, c, g, or t
  misc_feature (1191)..(1191): n is a, c, g, or t
  misc_feature (1197)..(1197): n is a, c, g, or t
  misc_feature (1200)..(1200): n is a, c, g, or t
  misc_feature (1203)..(1203): n is a, c, g, or t
  misc_feature (1209)..(1209): n is a, c, g, or t
  misc_feature (1215)..(1215): n is a, c, g, or t
  misc_feature (1218)..(1218): n is a, c, g, or t
  misc_feature (1221)..(1221): n is a, c, g, or t
  misc_feature (1227)..(1227): n is a, c, g, or t
  misc_feature (1230)..(1230): n is a, c, g, or t
  misc_feature (1236)..(1236): n is a, c, g, or t
  misc_feature (1242)..(1242): n is a, c, g, or t
  misc_feature (1245)..(1245): n is a, c, g, or t
  misc_feature (1251)..(1251): n is a, c, g, or t
  misc_feature (1254)..(1254): n is a, c, g, or t
  misc_feature (1263)..(1263): n is a, c, g, or t
  misc_feature (1266)..(1266): n is a, c, g, or t
  misc_feature (1269)..(1269): n is a, c, g, or t
  misc_feature (1272)..(1272): n is a, c, g, or t
  misc_feature (1275)..(1275): n is a, c, g, or t
  misc_feature (1278)..(1278): n is a, c, g, or t
  misc_feature (1281)..(1281): n is a, c, g, or t
  misc_feature (1284)..(1284): n is a, c, g, or t
  misc_feature (1287)..(1287): n is a, c, g, or t
  misc_feature (1290)..(1290): n is a, c, g, or t
  misc_feature (1293)..(1293): n is a, c, g, or t
  misc_feature (1296)..(1296): n is a, c, g, or t
  misc_feature (1299)..(1299): n is a, c, g, or t
  misc_feature (1308)..(1308): n is a, c, g, or t
  misc_feature (1314)..(1314): n is a, c, g, or t
  misc_feature (1317)..(1317): n is a, c, g, or t
  misc_feature (1320)..(1320): n is a, c, g, or t
  misc_feature (1323)..(1323): n is a, c, g, or t
  misc_feature (1326)..(1326): n is a, c, g, or t
  misc_feature (1329)..(1329): n is a, c, g, or t
  misc_feature (1332)..(1332): n is a, c, g, or t
  misc_feature (1335)..(1335): n is a, c, g, or t
  misc_feature (1338)..(1338): n is a, c, g, or t
  misc_feature (1341)..(1341): n is a, c, g, or t
  misc_feature (1344)..(1344): n is a, c, g, or t
  misc_feature (1347)..(1347): n is a, c, g, or t
  misc_feature (1350)..(1350): n is a, c, g, or t
  misc_feature (1353)..(1353): n is a, c, g, or t
  misc_feature (1359)..(1359): n is a, c, g, or t
  misc_feature (1362)..(1362): n is a, c, g, or t
  misc_feature (1371)..(1371): n is a, c, g, or t
  misc_feature (1374)..(1374): n is a, c, g, or t
  misc_feature (1377)..(1377): n is a, c, g, or t
  misc_feature (1380)..(1380): n is a, c, g, or t
  misc_feature (1383)..(1383): n is a, c, g, or t
  misc_feature (1386)..(1386): n is a, c, g, or t
  misc_feature (1389)..(1389): n is a, c, g, or t
  misc_feature (1398)..(1398): n is a, c, g, or t
  misc_feature (1401)..(1401): n is a, c, g, or t
  misc_feature (1404)..(1404): n is a, c, g, or t
  misc_feature (1407)..(1407): n is a, c, g, or t
  misc_feature (1410)..(1410): n is a, c, g, or t
  misc_feature (1413)..(1413): n is a, c, g, or t
  misc_feature (1416)..(1416): n is a, c, g, or t
  misc_feature (1419)..(1419): n is a, c, g, or t
  misc_feature (1422)..(1422): n is a, c, g, or t
  misc_feature (1425)..(1425): n is a, c, g, or t
  misc_feature (1431)..(1431): n is a, c, g, or t
  misc_feature (1434)..(1434): n is a, c, g, or t
  misc_feature (1440)..(1440): n is a, c, g, or t
  misc_feature (1443)..(1443): n is a, c, g, or t
  misc_feature (1452)..(1452): n is a, c, g, or t
  misc_feature (1455)..(1455): n is a, c, g, or t
  misc_feature (1458)..(1458): n is a, c, g, or t
  misc_feature (1461)..(1461): n is a, c, g, or t
  misc_feature (1467)..(1467): n is a, c, g, or t
  misc_feature (1470)..(1470): n is a, c, g, or t
  misc_feature (1473)..(1473): n is a, c, g, or t
  misc_feature (1476)..(1476): n is a, c, g, or t
  misc_feature (1479)..(1479): n is a, c, g, or t
  misc_feature (1482)..(1482): n is a, c, g, or t
  misc_feature (1485)..(1485): n is a, c, g, or t
  misc_feature (1488)..(1488): n is a, c, g, or t
  misc_feature (1491)..(1491): n is a, c, g, or t
  misc_feature (1494)..(1494): n is a, c, g, or t
  misc_feature (1497)..(1497): n is a, c, g, or t
  misc_feature (1503)..(1503): n is a, c, g, or t
  misc_feature (1506)..(1506): n is a, c, g, or t
  misc_feature (1512)..(1512): n is a, c, g, or t
  misc_feature (1515)..(1515): n is a, c, g, or t
  misc_feature (1521)..(1521): n is a, c, g, or t
  misc_feature (1524)..(1524): n is a, c, g, or t
  misc_feature (1527)..(1527): n is a, c, g, or t
  misc_feature (1530)..(1530): n is a, c, g, or t
  misc_feature (1533)..(1533): n is a, c, g, or t
  misc_feature (1536)..(1536): n is a, c, g, or t
  misc_feature (1542)..(1542): n is a, c, g, or t
  misc_feature (1545)..(1545): n is a, c, g, or t
  misc_feature (1551)..(1551): n is a, c, g, or t
  misc_feature (1554)..(1554): n is a, c, g, or t
  misc_feature (1557)..(1557): n is a, c, g, or t
  misc_feature (1560)..(1560): n is a, c, g, or t
  misc_feature (1563)..(1563): n is a, c, g, or t
  misc_feature (1566)..(1566): n is a, c, g, or t
  misc_feature (1569)..(1569): n is a, c, g, or t
  misc_feature (1572)..(1572): n is a, c, g, or t
  misc_feature (1575)..(1575): n is a, c, g, or t
  misc_feature (1578)..(1578): n is a, c, g, or t
  misc_feature (1581)..(1581): n is a, c, g, or t
  misc_feature (1587)..(1587): n is a, c, g, or t
  misc_feature (1590)..(1590): n is a, c, g, or t
  misc_feature (1596)..(1596): n is a, c, g, or t
  misc_feature (1599)..(1599): n is a, c, g, or t
  misc_feature (1602)..(1602): n is a, c, g, or t
  misc_feature (1605)..(1605): n is a, c, g, or t
  misc_feature (1608)..(1608): n is a, c, g, or t
  misc_feature (1611)..(1611): n is a, c, g, or t
  misc_feature (1614)..(1614): n is a, c, g, or t
  misc_feature (1617)..(1617): n is a, c, g, or t
  misc_feature (1620)..(1620): n is a, c, g, or t
  misc_feature (1623)..(1623): n is a, c, g, or t
  misc_feature (1626)..(1626): n is a, c, g, or t
  misc_feature (1632)..(1632): n is a, c, g, or t
  misc_feature (1635)..(1635): n is a, c, g, or t
  misc_feature (1638)..(1638): n is a, c, g, or t
  misc_feature (1641)..(1641): n is a, c, g, or t
  misc_feature (1644)..(1644): n is a, c, g, or t
  misc_feature (1650)..(1650): n is a, c, g, or t
  misc_feature (1656)..(1656): n is a, c, g, or t
  misc_feature (1659)..(1659): n is a, c, g, or t
  misc_feature (1665)..(1665): n is a, c, g, or t
  misc_feature (1668)..(1668): n is a, c, g, or t
  misc_feature (1671)..(1671): n is a, c, g, or t
  misc_feature (1674)..(1674): n is a, c, g, or t
  misc_feature (1677)..(1677): n is a, c, g, or t
  misc_feature (1683)..(1683): n is a, c, g, or t
  misc_feature (1686)..(1686): n is a, c, g, or t
  misc_feature (1689)..(1689): n is a, c, g, or t
  misc_feature (1695)..(1695): n is a, c, g, or t
  misc_feature (1701)..(1701): n is a, c, g, or t
  misc_feature (1704)..(1704): n is a, c, g, or t
  misc_feature (1710)..(1710): n is a, c, g, or t
  misc_feature (1713)..(1713): n is a, c, g, or t
  misc_feature (1722)..(1722): n is a, c, g, or t
  misc_feature (1725)..(1725): n is a, c, g, or t
  misc_feature (1731)..(1731): n is a, c, g, or t
  misc_feature (1734)..(1734): n is a, c, g, or t
  misc_feature (1737)..(1737): n is a, c, g, or t
  misc_feature (1740)..(1740): n is a, c, g, or t
  misc_feature (1749)..(1749): n is a, c, g, or t
  misc_feature (1752)..(1752): n is a, c, g, or t
  misc_feature (1755)..(1755): n is a, c, g, or t
  misc_feature (1758)..(1758): n is a, c, g, or t
  misc_feature (1761)..(1761): n is a, c, g, or t
  misc_feature (1764)..(1764): n is a, c, g, or t
  misc_feature (1767)..(1767): n is a, c, g, or t
  misc_feature (1770)..(1770): n is a, c, g, or t
  misc_feature (1776)..(1776): n is a, c, g, or t
  misc_feature (1779)..(1779): n is a, c, g, or t
  misc_feature (1782)..(1782): n is a, c, g, or t
  misc_feature (1785)..(1785): n is a, c, g, or t
  misc_feature (1788)..(1788): n is a, c, g, or t
  misc_feature (1791)..(1791): n is a, c, g, or t
  misc_feature (1794)..(1794): n is a, c, g, or t
  misc_feature (1797)..(1797): n is a, c, g, or t
  misc_feature (1803)..(1803): n is a, c, g, or t
  misc_feature (1812)..(1812): n is a, c, g, or t
  misc_feature (1818)..(1818): n is a, c, g, or t
  misc_feature (1821)..(1821): n is a, c, g, or t
  misc_feature (1824)..(1824): n is a, c, g, or t
  misc_feature (1827)..(1827): n is a, c, g, or t
  misc_feature (1830)..(1830): n is a, c, g, or t
  misc_feature (1833)..(1833): n is a, c, g, or t
  misc_feature (1836)..(1836): n is a, c, g, or t
  misc_feature (1839)..(1839): n is a, c, g, or t
  misc_feature (1842)..(1842): n is a, c, g, or t
  misc_feature (1845)..(1845): n is a, c, g, or t
  misc_feature (1848)..(1848): n is a, c, g, or t
  misc_feature (1851)..(1851): n is a, c, g, or t
  misc_feature (1854)..(1854): n is a, c, g, or t
  misc_feature (1857)..(1857): n is a, c, g, or t
  misc_feature (1860)..(1860): n is a, c, g, or t
  misc_feature (1863)..(1863): n is a, c, g, or t
  misc_feature (1866)..(1866): n is a, c, g, or t
  misc_feature (1872)..(1872): n is a, c, g, or t
  misc_feature (1875)..(1875): n is a, c, g, or t
  misc_feature (1881)..(1881): n is a, c, g, or t
  misc_feature (1884)..(1884): n is a, c, g, or t
  misc_feature (1887)..(1887): n is a, c, g, or t
  misc_feature (1890)..(1890): n is a, c, g, or t
  misc_feature (1893)..(1893): n is a, c, g, or t
  misc_feature (1896)..(1896): n is a, c, g, or t
  misc_feature (1899)..(1899): n is a, c, g, or t
  misc_feature (1902)..(1902): n is a, c, g, or t
  misc_feature (1908)..(1908): n is a, c, g, or t
  misc_feature (1911)..(1911): n is a, c, g, or t
  misc_feature (1914)..(1914): n is a, c, g, or t
  misc_feature (1917)..(1917): n is a, c, g, or t
  misc_feature (1920)..(1920): n is a, c, g, or t
  misc_feature (1923)..(1923): n is a, c, g, or t
  misc_feature (1929)..(1929): n is a, c, g, or t
  misc_feature (1935)..(1935): n is a, c, g, or t
  misc_feature (1938)..(1938): n is a, c, g, or t
  misc_feature (1941)..(1941): n is a, c, g, or t
  misc_feature (1947)..(1947): n is a, c, g, or t
  misc_feature (1956)..(1956): n is a, c, g, or t
  misc_feature (1962)..(1962): n is a, c, g, or t
  misc_feature (1965)..(1965): n is a, c, g, or t
  misc_feature (1974)..(1974): n is a, c, g, or t
  misc_feature (1980)..(1980): n is a, c, g, or t
  misc_feature (1983)..(1983): n is a, c, g, or t
  misc_feature (1986)..(1986): n is a, c, g, or t
  misc_feature (1989)..(1989): n is a, c, g, or t
  misc_feature (1992)..(1992): n is a, c, g, or t
  misc_feature (1995)..(1995): n is a, c, g, or t
  misc_feature (2001)..(2001): n is a, c, g, or t
  misc_feature (2004)..(2004): n is a, c, g, or t
  misc_feature (2007)..(2007): n is a, c, g, or t
  misc_feature (2010)..(2010): n is a, c, g, or t
  misc_feature (2013)..(2013): n is a, c, g, or t
  misc_feature (2016)..(2016): n is a, c, g, or t
  misc_feature (2019)..(2019): n is a, c, g, or t
  misc_feature (2022)..(2022): n is a, c, g, or t
  misc_feature (2028)..(2028): n is a, c, g, or t
  misc_feature (2031)..(2031): n is a, c, g, or t
  misc_feature (2034)..(2034): n is a, c, g, or t
  misc_feature (2037)..(2037): n is a, c, g, or t
  misc_feature (2040)..(2040): n is a, c, g, or t
  misc_feature (2043)..(2043): n is a, c, g, or t
  misc_feature (2046)..(2046): n is a, c, g, or t
  misc_feature (2049)..(2049): n is a, c, g, or t
  misc_feature (2055)..(2055): n is a, c, g, or t
  misc_feature (2058)..(2058): n is a, c, g, or t
  misc_feature (2061)..(2061): n is a, c, g, or t
  misc_feature (2064)..(2064): n is a, c, g, or t
  misc_feature (2067)..(2067): n is a, c, g, or t
  misc_feature (2073)..(2073): n is a, c, g, or t
  misc_feature (2076)..(2076): n is a, c, g, or t
  misc_feature (2079)..(2079): n is a, c, g, or t
  misc_feature (2082)..(2082): n is a, c, g, or t
  misc_feature (2085)..(2085): n is a, c, g, or t
  misc_feature (2088)..(2088): n is a, c, g, or t
  misc_feature (2091)..(2091): n is a, c, g, or t
  misc_feature (2097)..(2097): n is a, c, g, or t
  misc_feature (2100)..(2100): n is a, c, g, or t
  misc_feature (2103)..(2103): n is a, c, g, or t
  misc_feature (2106)..(2106): n is a, c, g, or t
  misc_feature (2109)..(2109): n is a, c, g, or t
  misc_feature (2112)..(2112): n is a, c, g, or t
  misc_feature (2115)..(2115): n is a, c, g, or t
  misc_feature (2118)..(2118): n is a, c, g, or t
  misc_feature (2121)..(2121): n is a, c, g, or t
  misc_feature (2124)..(2124): n is a, c, g, or t
  misc_feature (2127)..(2127): n is a, c, g, or t
  misc_feature (2130)..(2130): n is a, c, g, or t
  misc_feature (2136)..(2136): n is a, c, g, or t
  misc_feature (2142)..(2142): n is a, c, g, or t
  misc_feature (2145)..(2145): n is a, c, g, or t
  misc_feature (2148)..(2148): n is a, c, g, or t
  misc_feature (2151)..(2151): n is a, c, g, or t
  misc_feature (2154)..(2154): n is a, c, g, or t
  misc_feature (2157)..(2157): n is a, c, g, or t
  misc_feature (2160)..(2160): n is a, c, g, or t
  misc_feature (2163)..(2163): n is a, c, g, or t
  misc_feature (2166)..(2166): n is a, c, g, or t
  misc_feature (2169)..(2169): n is a, c, g, or t
  misc_feature (2172)..(2172): n is a, c, g, or t
  misc_feature (2181)..(2181): n is a, c, g, or t
  misc_feature (2184)..(2184): n is a, c, g, or t
  misc_feature (2190)..(2190): n is a, c, g, or t
  misc_feature (2193)..(2193): n is a, c, g, or t
  misc_feature (2196)..(2196): n is a, c, g, or t
  misc_feature (2199)..(2199): n is a, c, g, or t
  misc_feature (2205)..(2205): n is a, c, g, or t
  misc_feature (2208)..(2208): n is a, c, g, or t
  misc_feature (2211)..(2211): n is a, c, g, or t
  misc_feature (2214)..(2214): n is a, c, g, or t
  misc_feature (2217)..(2217): n is a, c, g, or t
  misc_feature (2220)..(2220): n is a, c, g, or t
  misc_feature (2223)..(2223): n is a, c, g, or t
  misc_feature (2226)..(2226): n is a, c, g, or t
  misc_feature (2232)..(2232): n is a, c, g, or t
  misc_feature (2235)..(2235): n is a, c, g, or t
  misc_feature (2238)..(2238): n is a, c, g, or t
  misc_feature (2244)..(2244): n is a, c, g, or t
  misc_feature (2247)..(2247): n is a, c, g, or t
  misc_feature (2250)..(2250): n is a, c, g, or t
  misc_feature (2253)..(2253): n is a, c, g, or t
  misc_feature (2256)..(2256): n is a, c, g, or t
  misc_feature (2259)..(2259): n is a, c, g, or t
  misc_feature (2262)..(2262): n is a, c, g, or t
  misc_feature (2271)..(2271): n is a, c, g, or t
  misc_feature (2277)..(2277): n is a, c, g, or t
  misc_feature (2280)..(2280): n is a, c, g, or t
  misc_feature (2289)..(2289): n is a, c, g, or t
  misc_feature (2292)..(2292): n is a, c, g, or t
  misc_feature (2295)..(2295): n is a, c, g, or t
  misc_feature (2298)..(2298): n is a, c, g, or t
  misc_feature (2301)..(2301): n is a, c, g, or t
  misc_feature (2307)..(2307): n is a, c, g, or t
  misc_feature (2310)..(2310): n is a, c, g, or t
  misc_feature (2313)..(2313): n is a, c, g, or t
  misc_feature (2316)..(2316): n is a, c, g, or t
  misc_feature (2319)..(2319): n is a, c, g, or t
  misc_feature (2325)..(2325): n is a, c, g, or t
  misc_feature (2328)..(2328): n is a, c, g, or t
  misc_feature (2331)..(2331): n is a, c, g, or t
  misc_feature (2334)..(2334): n is a, c, g, or t
  misc_feature (2340)..(2340): n is a, c, g, or t
  misc_feature (2343)..(2343): n is a, c, g, or t
  misc_feature (2349)..(2349): n is a, c, g, or t
  misc_feature (2352)..(2352): n is a, c, g, or t
  misc_feature (2355)..(2355): n is a, c, g, or t
  misc_feature (2358)..(2358): n is a, c, g, or t
  misc_feature (2361)..(2361): n is a, c, g, or t
  misc_feature (2367)..(2367): n is a, c, g, or t
  misc_feature (2370)..(2370): n is a, c, g, or t
  misc_feature (2376)..(2376): n is a, c, g, or t
  misc_feature (2379)..(2379): n is a, c, g, or t
  misc_feature (2385)..(2385): n is a, c, g, or t
  misc_feature (2388)..(2388): n is a, c, g, or t
  misc_feature (2391)..(2391): n is a, c, g, or t
  misc_feature (2394)..(2394): n is a, c, g, or t
  misc_feature (2397)..(2397): n is a, c, g, or t
  misc_feature (2400)..(2400): n is a, c, g, or t
  misc_feature (2403)..(2403): n is a, c, g, or t
  misc_feature (2406)..(2406): n is a, c, g, or t
  misc_feature (2412)..(2412): n is a, c, g, or t
  misc_feature (2415)..(2415): n is a, c, g, or t
  misc_feature (2424)..(2424): n is a, c, g, or t
  misc_feature (2427)..(2427): n is a, c, g, or t
  misc_feature (2430)..(2430): n is a, c, g, or t
  misc_feature (2433)..(2433): n is a, c, g, or t
  misc_feature (2436)..(2436): n is a, c, g, or t
  misc_feature (2439)..(2439): n is a, c, g, or t
  misc_feature (2442)..(2442): n is a, c, g, or t
  misc_feature (2448)..(2448): n is a, c, g, or t
  misc_feature (2451)..(2451): n is a, c, g, or t
  misc_feature (2454)..(2454): n is a, c, g, or t
  misc_feature (2457)..(2457): n is a, c, g, or t
  misc_feature (2460)..(2460): n is a, c, g, or t
  misc_feature (2463)..(2463): n is a, c, g, or t
  misc_feature (2466)..(2466): n is a, c, g, or t
  misc_feature (2469)..(2469): n is a, c, g, or t
  misc_feature (2472)..(2472): n is a, c, g, or t
  misc_feature (2475)..(2475): n is a, c, g, or t
  misc_feature (2478)..(2478): n is a, c, g, or t
  misc_feature (2481)..(2481): n is a, c, g, or t
  misc_feature (2484)..(2484): n is a, c, g, or t
  misc_feature (2487)..(2487): n is a, c, g, or t
  misc_feature (2490)..(2490): n is a, c, g, or t
  misc_feature (2493)..(2493): n is a, c, g, or t
  misc_feature (2496)..(2496): n is a, c, g, or t
  misc_feature (2502)..(2502): n is a, c, g, or t
  misc_feature (2505)..(2505): n is a, c, g, or t
  misc_feature (2508)..(2508): n is a, c, g, or t
  misc_feature (2514)..(2514): n is a, c, g, or t
  misc_feature (2517)..(2517): n is a, c, g, or t
  misc_feature (2520)..(2520): n is a, c, g, or t
  misc_feature (2523)..(2523): n is a, c, g, or t
  misc_feature (2526)..(2526): n is a, c, g, or t
  misc_feature (2532)..(2532): n is a, c, g, or t
  misc_feature (2535)..(2535): n is a, c, g, or t
  misc_feature (2538)..(2538): n is a, c, g, or t
  misc_feature (2541)..(2541): n is a, c, g, or t
  misc_feature (2544)..(2544): n is a, c, g, or t
  misc_feature (2550)..(2550): n is a, c, g, or t
  misc_feature (2553)..(2553): n is a, c, g, or t
  misc_feature (2556)..(2556): n is a, c, g, or t
  misc_feature (2559)..(2559): n is a, c, g, or t
  misc_feature (2562)..(2562): n is a, c, g, or t
  misc_feature (2568)..(2568): n is a, c, g, or t
  misc_feature (2574)..(2574): n is a, c, g, or t
  misc_feature (2577)..(2577): n is a, c, g, or t
  misc_feature (2583)..(2583): n is a, c, g, or t
  misc_feature (2586)..(2586): n is a, c, g, or t
  misc_feature (2589)..(2589): n is a, c, g, or t
  misc_feature (2592)..(2592): n is a, c, g, or t
  misc_feature (2595)..(2595): n is a, c, g, or t
  misc_feature (2598)..(2598): n is a, c, g, or t
  misc_feature (2601)..(2601): n is a, c, g, or t
  misc_feature (2604)..(2604): n is a, c, g, or t
  misc_feature (2607)..(2607): n is a, c, g, or t
  misc_feature (2610)..(2610): n is a, c, g, or t
  misc_feature (2613)..(2613): n is a, c, g, or t
  misc_feature (2616)..(2616): n is a, c, g, or t
  misc_feature (2619)..(2619): n is a, c, g, or t
  misc_feature (2622)..(2622): n is a, c, g, or t
  misc_feature (2625)..(2625): n is a, c, g, or t
  misc_feature (2628)..(2628): n is a, c, g, or t
  misc_feature (2631)..(2631): n is a, c, g, or t
  misc_feature (2634)..(2634): n is a, c, g, or t
  misc_feature (2637)..(2637): n is a, c, g, or t
  misc_feature (2640)..(2640): n is a, c, g, or t
  misc_feature (2643)..(2643): n is a, c, g, or t
  misc_feature (2646)..(2646): n is a, c, g, or t
  misc_feature (2649)..(2649): n is a, c, g, or t
  misc_feature (2658)..(2658): n is a, c, g, or t
  misc_feature (2664)..(2664): n is a, c, g, or t
  misc_feature (2667)..(2667): n is a, c, g, or t
  misc_feature (2673)..(2673): n is a, c, g, or t
  misc_feature (2676)..(2676): n is a, c, g, or t
  misc_feature (2679)..(2679): n is a, c, g, or t
  misc_feature (2685)..(2685): n is a, c, g, or t
  misc_feature (2688)..(2688): n is a, c, g, or t
  misc_feature (2694)..(2694): n is a, c, g, or t
  misc_feature (2697)..(2697): n is a, c, g, or t
  misc_feature (2700)..(2700): n is a, c, g, or t
  misc_feature (2703)..(2703): n is a, c, g, or t
  misc_feature (2706)..(2706): n is a, c, g, or t
  misc_feature (2709)..(2709): n is a, c, g, or t
  misc_feature (2712)..(2712): n is a, c, g, or t
  misc_feature (2715)..(2715): n is a, c, g, or t
  misc_feature (2718)..(2718): n is a, c, g, or t
  misc_feature (2721)..(2721): n is a, c, g, or t
  misc_feature (2730)..(2730): n is a, c, g, or t
  misc_feature (2733)..(2733): n is a, c, g, or t
  misc_feature (2739)..(2739): n is a, c, g, or t
  misc_feature (2742)..(2742): n is a, c, g, or t
  misc_feature (2745)..(2745): n is a, c, g, or t
  misc_feature (2748)..(2748): n is a, c, g, or t
  misc_feature (2757)..(2757): n is a, c, g, or t
  misc_feature (2763)..(2763): n is a, c, g, or t
  misc_feature (2766)..(2766): n is a, c, g, or t
  misc_feature (2772)..(2772): n is a, c, g, or t
  misc_feature (2775)..(2775): n is a, c, g, or t
  misc_feature (2781)..(2781): n is a, c, g, or t
  misc_feature (2784)..(2784): n is a, c, g, or t
  misc_feature (2787)..(2787): n is a, c, g, or t
  misc_feature (2793)..(2793): n is a, c, g, or t
  misc_feature (2799)..(2799): n is a, c, g, or t
  misc_feature (2802)..(2802): n is a, c, g, or t
  misc_feature (2808)..(2808): n is a, c, g, or t
  misc_feature (2811)..(2811): n is a, c, g, or t
  misc_feature (2814)..(2814): n is a, c, g, or t
  misc_feature (2820)..(2820): n is a, c, g, or t
  misc_feature (2823)..(2823): n is a, c, g, or t
  misc_feature (2826)..(2826): n is a, c, g, or t
  misc_feature (2829)..(2829): n is a, c, g, or t
  misc_feature (2832)..(2832): n is a, c, g, or t
  misc_feature (2835)..(2835): n is a, c, g, or t
  misc_feature (2838)..(2838): n is a, c, g, or t
  misc_feature (2841)..(2841): n is a, c, g, or t
  misc_feature (2844)..(2844): n is a, c, g, or t
  misc_feature (2847)..(2847): n is a, c, g, or t
  misc_feature (2856)..(2856): n is a, c, g, or t
  misc_feature (2859)..(2859): n is a, c, g, or t
  misc_feature (2862)..(2862): n is a, c, g, or t
  misc_feature (2865)..(2865): n is a, c, g, or t
  misc_feature (2868)..(2868): n is a, c, g, or t
  misc_feature (2871)..(2871): n is a, c, g, or t
  misc_feature (2874)..(2874): n is a, c, g, or t
  misc_feature (2877)..(2877): n is a, c, g, or t
  misc_feature (2880)..(2880): n is a, c, g, or t
  misc_feature (2883)..(2883): n is a, c, g, or t
  misc_feature (2886)..(2886): n is a, c, g, or t
  misc_feature (2889)..(2889): n is a, c, g, or t
  misc_feature (2892)..(2892): n is a, c, g, or t
  misc_feature (2895)..(2895): n is a, c, g, or t
  misc_feature (2898)..(2898): n is a, c, g, or t
  misc_feature (2901)..(2901): n is a, c, g, or t
  misc_feature (2904)..(2904): n is a, c, g, or t
  misc_feature (2907)..(2907): n is a, c, g, or t
  misc_feature (2910)..(2910): n is a, c, g, or t
  misc_feature (2913)..(2913): n is a, c, g, or t
  misc_feature (2916)..(2916): n is a, c, g, or t
  misc_feature (2919)..(2919): n is a, c, g, or t
  misc_feature (2928)..(2928): n is a, c, g, or t
  misc_feature (2931)..(2931): n is a, c, g, or t
  misc_feature (2937)..(2937): n is a, c, g, or t
  misc_feature (2943)..(2943): n is a, c, g, or t
  misc_feature (2946)..(2946): n is a, c, g, or t
  misc_feature (2949)..(2949): n is a, c, g, or t
  misc_feature (2955)..(2955): n is a, c, g, or t
  misc_feature (2958)..(2958): n is a, c, g, or t
  misc_feature (2961)..(2961): n is a, c, g, or t
  misc_feature (2964)..(2964): n is a, c, g, or t
  misc_feature (2967)..(2967): n is a, c, g, or t
  misc_feature (2970)..(2970): n is a, c, g, or t
  misc_feature (2973)..(2973): n is a, c, g, or t
  misc_feature (2976)..(2976): n is a, c, g, or t
  misc_feature (2979)..(2979): n is a, c, g, or t
  misc_feature (2982)..(2982): n is a, c, g, or t
  misc_feature (2988)..(2988): n is a, c, g, or t
  misc_feature (2991)..(2991): n is a, c, g, or t
  misc_feature (2994)..(2994): n is a, c, g, or t
  misc_feature (2997)..(2997): n is a, c, g, or t
  misc_feature (3000)..(3000): n is a, c, g, or t
  misc_feature (3003)..(3003): n is a, c, g, or t
  misc_feature (3006)..(3006): n is a, c, g, or t
  misc_feature (3009)..(3009): n is a, c, g, or t
  misc_feature (3015)..(3015): n is a, c, g, or t
  misc_feature (3018)..(3018): n is a, c, g, or t
  misc_feature (3021)..(3021): n is a, c, g, or t
  misc_feature (3024)..(3024): n is a, c, g, or t
  misc_feature (3027)..(3027): n is a, c, g, or t
  misc_feature (3030)..(3030): n is a, c, g, or t
  misc_feature (3033)..(3033): n is a, c, g, or t
  misc_feature (3036)..(3036): n is a, c, g, or t
  misc_feature (3039)..(3039): n is a, c, g, or t
  misc_feature (3042)..(3042): n is a, c, g, or t
ggnccnatgggnccnatgggnccnmgnggnccnccnggnccngcnggngcnccnggnccncarggnttycarggnaayccnggngarccnggngarccnggngtnwsnggnccnatgggnccnmgnggnccnccnggnccnccnggnaarccnggngaygayggngargcnggnaarccnggnaargcnggngarmgnggnccnccnggnccncarggngcnmgnggnttyccnggnacnccnggnytnccnggngtnaarggncaymgnggntayccnggnytngayggngcnaarggngargcnggngcnccnggngtnaarggngarwsnggnwsnccnggngaraayggnwsnccnggnccnatgggnccnmgnggnytnccnggngarmgnggnmgnacnggnccngcnggngcngcnggngcnmgnggnaaygayggncarccnggnccngcnggnccnccnggnccngtnggnccngcnggnggnccnggnttyccnggngcnccnggngcnaarggngargcnggnccnacnggngcnmgnggnccngarggngcncarggnccnmgnggngarccnggnacnccnggnwsnccnggnccngcnggngcnwsnggnaayccnggnacngayggnathccnggngcnaarggnwsngcnggngcnccnggnathgcnggngcnccnggnttyccnggnccnmgnggnccnccnggnccncarggngcnacnggnccnytnggnccnaarggncaracnggngarccnggnathgcnggnttyaarggngarcarggnccnaarggngarccnggnccngcnggnccncarggngcnccnggnccngcnggngargarggnaarmgnggngcnmgnggngarccnggnggngtnggnccnathggnccnccnggngarmgnggngcnccnggnaaymgnggnttyccnggncargayggnytngcnggnccnaarggngcnccnggngarmgnggnccnwsnggnytngcnggnccnaarggngcnaayggngayccnggnmgnccnggngarccnggnytnccnggngcnmgnggnytnacnggnmgnccnggngaygcnggnccncarggnaargtnggnccnwsnggngcnccnggngargayggnmgnccnggnccnccnggnccncarggngcnmgnggncarccnggngtnatgggnttyccnggnccnaarggngcnaayggngarccnggnaargcnggngaraarggnytnccnggngcnccnggnytnmgnggnytnccnggnaargayggngaracnggngcngcnggnccnccnggnccngcnggnccngcnggngarmgnggngarcarggngcnccnggnccnwsnggnttycarggnytnccnggnccnccnggnccnccnggngarggnggnaarccnggngaycarggngtnccnggngargcnggngcnccnggnytngtnggnccnmgnggngarmgnggnttyccnggngarmgnggnwsnccnggngcncarggnytncarggnccnmgnggnytnccnggnacnccnggnacngayggnccnaarggngcnwsnggnccngcnggnccnccnggngcncarggnccnccnggnytncarggnatgccnggngarmgnggngcngcnggnathgcnggnccnaarggngaymgnggngaygtnggngaraarggnccngarggngcnccnggnaargayggnggnmgnggnytnacnggnccnathggnccnccnggnccngcnggngcnaayggngaraarggngargtnggnccnccnggnccngcnggnwsngcnggngcnmgnggngcnccnggngarmgnggngaracnggnccnccnggnccngcnggnttygcnggnccnccnggngcngayggncarccnggngcnaarggngarcarggngargcnggncaraarggngaygcnggngcnccnggnccncarggnccnwsnggngcnccnggnccncarggnccnacnggngtnacnggnccnaarggngcnmgnggngcncarggnccnccnggngcnacnggnttyccnggngcngcnggnmgngtnggnccnccnggnwsnaayggnaayccnggnccnccnggnccnccnggnccnwsnggnaargayggnccnaarggngcnmgnggngaywsnggnccnccnggnmgngcnggngarccnggnytncarggnccngcnggnccnccnggngaraarggngarccnggngaygayggnccnwsnggngcngarggnccnccnggnccncarggnytngcnggncarmgnggnathgtnggnytnccnggncarmgnggngarmgnggnttyccnggnytnccnggnccnwsnggngarccnggnaarcarggngcnccnggngcnwsnggngaymgnggnccnccnggnccngtnggnccnccnggnytnacnggnccngcnggngarccnggnmgngarggnwsnccnggngcngayggnccnccnggnmgngayggngcngcnggngtnaarggngaymgnggngaracnggngcngtnggngcnccnggngcnccnggnccnccnggnwsnccnggnccngcnggnccnacnggnaarcarggngaymgnggngargcnggngcncarggnccnatgggnccnwsnggnccngcnggngcnmgnggnathcarggnccncarggnccnmgnggngayaarggngargcnggngarccnggngarmgnggnytnaarggncaymgnggnttyacnggnytncarggnytnccnggnccnccnggnccnwsnggngaycarggngcnwsnggnccngcnggnccnwsnggnccnmgnggnccnccnggnccngtnggnccnwsnggnaargayggngcnaayggnathccnggnccnathggnccnccnggnccnmgnggnmgnwsnggngaracnggnccngcnggnccnccnggnaayccnggnccnccnggnccnccnggnccnccn

SEQ ID NO: 1099 - DNA, 3087 bp, Artificial Sequence
  hCol-CNA04 (alpha1(III) THD)
  misc_feature (3)..(3): n is a, c, g, or t
  misc_feature (6)..(6): n is a, c, g, or t
  misc_feature (9)..(9): n is a, c, g, or t
  misc_feature (12)..(12): n is a, c, g, or t
  misc_feature (18)..(18): n is a, c, g, or t
  misc_feature (21)..(21): n is a, c, g, or t
  misc_feature (24)..(24): n is a, c, g, or t
  misc_feature (27)..(27): n is a, c, g, or t
  misc_feature (30)..(30): n is a, c, g, or t
  misc_feature (33)..(33): n is a, c, g, or t
  misc_feature (36)..(36): n is a, c, g, or t
  misc_feature (39)..(39): n is a, c, g, or t
  misc_feature (42)..(42): n is a, c, g, or t
  misc_feature (45)..(45): n is a, c, g, or t
  misc_feature (48)..(48): n is a, c, g, or t
  misc_feature (51)..(51): n is a, c, g, or t
  misc_feature (54)..(54): n is a, c, g, or t
  misc_feature (57)..(57): n is a, c, g, or t
  misc_feature (60)..(60): n is a, c, g, or t
  misc_feature (63)..(63): n is a, c, g, or t
  misc_feature (66)..(66): n is a, c, g, or t
  misc_feature (72)..(72): n is a, c, g, or t
  misc_feature (75)..(75): n is a, c, g, or t
  misc_feature (78)..(78): n is a, c, g, or t
  misc_feature (81)..(81): n is a, c, g, or t
  misc_feature (84)..(84): n is a, c, g, or t
  misc_feature (87)..(87): n is a, c, g, or t
  misc_feature (90)..(90): n is a, c, g, or t
  misc_feature (93)..(93): n is a, c, g, or t
  misc_feature (102)..(102): n is a, c, g, or t
  misc_feature (105)..(105): n is a, c, g, or t
  misc_feature (108)..(108): n is a, c, g, or t
  misc_feature (111)..(111): n is a, c, g, or t
  misc_feature (117)..(117): n is a, c, g, or t
  misc_feature (120)..(120): n is a, c, g, or t
  misc_feature (126)..(126): n is a, c, g, or t
  misc_feature (129)..(129): n is a, c, g, or t
  misc_feature (132)..(132): n is a, c, g, or t
  misc_feature (135)..(135): n is a, c, g, or t
  misc_feature (138)..(138): n is a, c, g, or t
  misc_feature (141)..(141): n is a, c, g, or t
  misc_feature (144)..(144): n is a, c, g, or t
  misc_feature (147)..(147): n is a, c, g, or t
  misc_feature (150)..(150): n is a, c, g, or t
  misc_feature (153)..(153): n is a, c, g, or t
  misc_feature (156)..(156): n is a, c, g, or t
  misc_feature (159)..(159): n is a, c, g, or t
  misc_feature (165)..(165): n is a, c, g, or t
  misc_feature (168)..(168): n is a, c, g, or t
  misc_feature (171)..(171): n is a, c, g, or t
  misc_feature (174)..(174): n is a, c, g, or t
  misc_feature (177)..(177): n is a, c, g, or t
  misc_feature (180)..(180): n is a, c, g, or t
  misc_feature (183)..(183): n is a, c, g, or t
  misc_feature (192)..(192): n is a, c, g, or t
  misc_feature (198)..(198): n is a, c, g, or t
  misc_feature (201)..(201): n is a, c, g, or t
  misc_feature (204)..(204): n is a, c, g, or t
  misc_feature (207)..(207): n is a, c, g, or t
  misc_feature (210)..(210): n is a, c, g, or t
  misc_feature (213)..(213): n is a, c, g, or t
  misc_feature (216)..(216): n is a, c, g, or t
  misc_feature (219)..(219): n is a, c, g, or t
  misc_feature (225)..(225): n is a, c, g, or t
  misc_feature (228)..(228): n is a, c, g, or t
  misc_feature (231)..(231): n is a, c, g, or t
  misc_feature (234)..(234): n is a, c, g, or t
  misc_feature (237)..(237): n is a, c, g, or t
  misc_feature (240)..(240): n is a, c, g, or t
  misc_feature (243)..(243): n is a, c, g, or t
  misc_feature (246)..(246): n is a, c, g, or t
  misc_feature (255)..(255): n is a, c, g, or t
  misc_feature (258)..(258): n is a, c, g, or t
  misc_feature (261)..(261): n is a, c, g, or t
  misc_feature (264)..(264): n is a, c, g, or t
  misc_feature (270)..(270): n is a, c, g, or t
  misc_feature (273)..(273): n is a, c, g, or t
  misc_feature (279)..(279): n is a, c, g, or t
  misc_feature (282)..(282): n is a, c, g, or t
  misc_feature (291)..(291): n is a, c, g, or t
  misc_feature (297)..(297): n is a, c, g, or t
  misc_feature (300)..(300): n is a, c, g, or t
  misc_feature (309)..(309): n is a, c, g, or t
  misc_feature (312)..(312): n is a, c, g, or t
  misc_feature (318)..(318): n is a, c, g, or t
  misc_feature (327)..(327): n is a, c, g, or t
  misc_feature (333)..(333): n is a, c, g, or t
  misc_feature (336)..(336): n is a, c, g, or t
  misc_feature (339)..(339): n is a, c, g, or t
  misc_feature (342)..(342): n is a, c, g, or t
  misc_feature (345)..(345): n is a, c, g, or t
  misc_feature (348)..(348): n is a, c, g, or t
  misc_feature (354)..(354): n is a, c, g, or t
  misc_feature (363)..(363): n is a, c, g, or t
  misc_feature (366)..(366): n is a, c, g, or t
  misc_feature (369)..(369): n is a, c, g, or t
  misc_feature (372)..(372): n is a, c, g, or t
  misc_feature (381)..(381): n is a, c, g, or t
  misc_feature (384)..(384): n is a, c, g, or t
  misc_feature (387)..(387): n is a, c, g, or t
  misc_feature (390)..(390): n is a, c, g, or t
  misc_feature (393)..(393): n is a, c, g, or t
  misc_feature (399)..(399): n is a, c, g, or t
  misc_feature (402)..(402): n is a, c, g, or t
  misc_feature (405)..(405): n is a, c, g, or t
  misc_feature (408)..(408): n is a, c, g, or t
  misc_feature (411)..(411): n is a, c, g, or t
  misc_feature (414)..(414): n is a, c, g, or t
  misc_feature (417)..(417): n is a, c, g, or t
  misc_feature (423)..(423): n is a, c, g, or t
  misc_feature (426)..(426): n is a, c, g, or t
  misc_feature (429)..(429): n is a, c, g, or t
  misc_feature (432)..(432): n is a, c, g, or t
  misc_feature (435)..(435): n is a, c, g, or t
  misc_feature (438)..(438): n is a, c, g, or t
  misc_feature (441)..(441): n is a, c, g, or t
  misc_feature (444)..(444): n is a, c, g, or t
  misc_feature (447)..(447): n is a, c, g, or t
  misc_feature (450)..(450): n is a, c, g, or t
  misc_feature (453)..(453): n is a, c, g, or t
  misc_feature (456)..(456): n is a, c, g, or t
  misc_feature (459)..(459): n is a, c, g, or t
  misc_feature (462)..(462): n is a, c, g, or t
  misc_feature (471)..(471): n is a, c, g, or t
  misc_feature (474)..(474): n is a, c, g, or t
  misc_feature (477)..(477): n is a, c, g, or t
  misc_feature (480)..(480): n is a, c, g, or t
  misc_feature (483)..(483): n is a, c, g, or t
  misc_feature (489)..(489): n is a, c, g, or t
  misc_feature (495)..(495): n is a, c, g, or t
  misc_feature (498)..(498): n is a, c, g, or t
  misc_feature (501)..(501): n is a, c, g, or t
  misc_feature (504)..(504): n is a, c, g, or t
  misc_feature (507)..(507): n is a, c, g, or t
  misc_feature (510)..(510): n is a, c, g, or t
  misc_feature (513)..(513): n is a, c, g, or t
  misc_feature (516)..(516): n is a, c, g, or t
  misc_feature (519)..(519): n is a, c, g, or t
  misc_feature (522)..(522): n is a, c, g, or t
  misc_feature (525)..(525): n is a, c, g, or t
  misc_feature (531)..(531): n is a, c, g, or t
  misc_feature (534)..(534): n is a, c, g, or t
  misc_feature (537)..(537): n is a, c, g, or t
  misc_feature (540)..(540): n is a, c, g, or t
  misc_feature (543)..(543): n is a, c, g, or t
  misc_feature (546)..(546): n is a, c, g, or t
  misc_feature (552)..(552): n is a, c, g, or t
  misc_feature (558)..(558): n is a, c, g, or t
  misc_feature (561)..(561): n is a, c, g, or t
  misc_feature (564)..(564): n is a, c, g, or t
  misc_feature (567)..(567): n is a, c, g, or t
  misc_feature (570)..(570): n is a, c, g, or t
  misc_feature (573)..(573): n is a, c, g, or t
  misc_feature (576)..(576): n is a, c, g, or t
  misc_feature (579)..(579): n is a, c, g, or t
  misc_feature (582)..(582): n is a, c, g, or t
  misc_feature (588)..(588): n is a, c, g, or t
  misc_feature (591)..(591): n is a, c, g, or t
  misc_feature (594)..(594): n is a, c, g, or t
  misc_feature (597)..(597): n is a, c, g, or t
  misc_feature (603)..(603): n is a, c, g, or t
  misc_feature (606)..(606): n is a, c, g, or t
  misc_feature (612)..(612): n is a, c, g, or t
  misc_feature (615)..(615): n is a, c, g, or t
  misc_feature (618)..(618): n is a, c, g, or t
  misc_feature (624)..(624): n is a, c, g, or t
  misc_feature (630)..(630): n is a, c, g, or t
  misc_feature (633)..(633): n is a, c, g, or t
  misc_feature (636)..(636): n is a, c, g, or t
  misc_feature (642)..(642): n is a, c, g, or t
  misc_feature (645)..(645): n is a, c, g, or t
  misc_feature (648)..(648): n is a, c, g, or t
  misc_feature (651)..(651): n is a, c, g, or t
  misc_feature (654)..(654): n is a, c, g, or t
  misc_feature (657)..(657): n is a, c, g, or t
  misc_feature (660)..(660): n is a, c, g, or t
  misc_feature (669)..(669): n is a, c, g, or t
  misc_feature (672)..(672): n is a, c, g, or t
  misc_feature (675)..(675): n is a, c, g, or t
  misc_feature (678)..(678): n is a, c, g, or t
  misc_feature (681)..(681): n is a, c, g, or t
  misc_feature (687)..(687): n is a, c, g, or t
  misc_feature (696)..(696): n is a, c, g, or t
  misc_feature (699)..(699): n is a, c, g, or t
  misc_feature (702)..(702): n is a, c, g, or t
  misc_feature (705)..(705): n is a, c, g, or t
  misc_feature (711)..(711): n is a, c, g, or t
  misc_feature (714)..(714): n is a, c, g, or t
  misc_feature (717)..(717): n is a, c, g, or t
  misc_feature (720)..(720): n is a, c, g, or t
  misc_feature (723)..(723): n is a, c, g, or t
  misc_feature (726)..(726): n is a, c, g, or t
  misc_feature (732)..(732): n is a, c, g, or t
  misc_feature (735)..(735): n is a, c, g, or t
  misc_feature (738)..(738): n is a, c, g, or t
  misc_feature (741)..(741): n is a, c, g, or t
  misc_feature (744)..(744): n is a, c, g, or t
  misc_feature (747)..(747): n is a, c, g, or t
  misc_feature (750)..(750): n is a, c, g, or t
  misc_feature (753)..(753): n is a, c, g, or t
  misc_feature (756)..(756): n is a, c, g, or t
  misc_feature (759)..(759): n is a, c, g, or t
  misc_feature (762)..(762): n is a, c, g, or t
  misc_feature (768)..(768): n is a, c, g, or t
  misc_feature (771)..(771): n is a, c, g, or t
  misc_feature (774)..(774): n is a, c, g, or t
  misc_feature (777)..(777): n is a, c, g, or t
  misc_feature (780)..(780): n is a, c, g, or t
  misc_feature (783)..(783): n is a, c, g, or t
  misc_feature (786)..(786): n is a, c, g, or t
  misc_feature (789)..(789): n is a, c, g, or t
  misc_feature (792)..(792): n is a, c, g, or t
  misc_feature (795)..(795): n is a, c, g, or t
  misc_feature (801)..(801): n is a, c, g, or t
  misc_feature (804)..(804): n is a, c, g, or t
  misc_feature (813)..(813): n is a, c, g, or t
  misc_feature (816)..(816): n is a, c, g, or t
  misc_feature (822)..(822): n is a, c, g, or t
  misc_feature (828)..(828): n is a, c, g, or t
  misc_feature (831)..(831): n is a, c, g, or t
  misc_feature (834)..(834): n is a, c, g, or t
  misc_feature (837)..(837): n is a, c, g, or t
  misc_feature (840)..(840): n is a, c, g, or t
  misc_feature (846)..(846): n is a, c, g, or t
  misc_feature (849)..(849): n is a, c, g, or t
  misc_feature (855)..(855): n is a, c, g, or t
  misc_feature (858)..(858): n is a, c, g, or t
  misc_feature (864)..(864): n is a, c, g, or t
  misc_feature (867)..(867): n is a, c, g, or t
  misc_feature (870)..(870): n is a, c, g, or t
  misc_feature (873)..(873): n is a, c, g, or t
  misc_feature (876)..(876): n is a, c, g, or t
  misc_feature (879)..(879): n is a, c, g, or t
  misc_feature (885)..(885): n is a, c, g, or t
  misc_feature (894)..(894): n is a, c, g, or t
  misc_feature (903)..(903): n is a, c, g, or t
  misc_feature (906)..(906): n is a, c, g, or t
  misc_feature (909)..(909): n is a, c, g, or t
  misc_feature (912)..(912): n is a, c, g, or t
  misc_feature (918)..(918): n is a, c, g, or t
  misc_feature (921)..(921): n is a, c, g, or t
  misc_feature (924)..(924): n is a, c, g, or t
  misc_feature (930)..(930): n is a, c, g, or t
  misc_feature (933)..(933): n is a, c, g, or t
  misc_feature (936)..(936): n is a, c, g, or t
  misc_feature (939)..(939): n is a, c, g, or t
  misc_feature (942)..(942): n is a, c, g, or t
  misc_feature (945)..(945): n is a, c, g, or t
  misc_feature (948)..(948): n is a, c, g, or t
  misc_feature (954)..(954): n is a, c, g, or t
  misc_feature (957)..(957): n is a, c, g, or t
  misc_feature (960)..(960): n is a, c, g, or t
  misc_feature (963)..(963): n is a, c, g, or t
  misc_feature (966)..(966): n is a, c, g, or t
  misc_feature (972)..(972): n is a, c, g, or t
  misc_feature (975)..(975): n is a, c, g, or t
  misc_feature (978)..(978): n is a, c, g, or t
  misc_feature (981)..(981): n is a, c, g, or t
  misc_feature (984)..(984): n is a, c, g, or t
  misc_feature (987)..(987): n is a, c, g, or t
  misc_feature (993)..(993): n is a, c, g, or t
  misc_feature (999)..(999): n is a, c, g, or t
  misc_feature (1002)..(1002): n is a, c, g, or t
  misc_feature (1011)..(1011): n is a, c, g, or t
  misc_feature (1014)..(1014): n is a, c, g, or t
  misc_feature (1017)..(1017): n is a, c, g, or t
  misc_feature (1020)..(1020): n is a, c, g, or t
  misc_feature (1026)..(1026): n is a, c, g, or t
  misc_feature (1029)..(1029): n is a, c, g, or t
  misc_feature (1032)..(1032): n is a, c, g, or t
  misc_feature (1035)..(1035): n is a, c, g, or t
  misc_feature (1038)..(1038): n is a, c, g, or t
  misc_feature (1041)..(1041): n is a, c, g, or t
  misc_feature (1044)..(1044): n is a, c, g, or t
  misc_feature (1047)..(1047): n is a, c, g, or t
  misc_feature (1050)..(1050): n is a, c, g, or t
  misc_feature (1053)..(1053): n is a, c, g, or t
  misc_feature (1056)..(1056): n is a, c, g, or t
  misc_feature (1059)..(1059): n is a, c, g, or t
  misc_feature (1062)..(1062): n is a, c, g, or t
  misc_feature (1065)..(1065): n is a, c, g, or t
  misc_feature (1071)..(1071): n is a, c, g, or t
  misc_feature (1074)..(1074): n is a, c, g, or t
  misc_feature (1077)..(1077): n is a, c, g, or t
  misc_feature (1083)..(1083): n is a, c, g, or t
  misc_feature (1086)..(1086): n is a, c, g, or t
  misc_feature (1089)..(1089): n is a, c, g, or t
  misc_feature (1092)..(1092): n is a, c, g, or t
  misc_feature (1095)..(1095): n is a, c, g, or t
  misc_feature (1098)..(1098): n is a, c, g, or t
  misc_feature (1101)..(1101): n is a, c, g, or t
  misc_feature (1107)..(1107): n is a, c, g, or t
  misc_feature (1110)..(1110): n is a, c, g, or t
  misc_feature (1116)..(1116): n is a, c, g, or t
  misc_feature (1119)..(1119): n is a, c, g, or t
  misc_feature (1122)..(1122): n is a, c, g, or t
  misc_feature (1125)..(1125): n is a, c, g, or t
  misc_feature (1128)..(1128): n is a, c, g, or t
  misc_feature (1131)..(1131): n is a, c, g, or t
  misc_feature (1134)..(1134): n is a, c, g, or t
  misc_feature (1137)..(1137): n is a, c, g, or t
  misc_feature (1140)..(1140): n is a, c, g, or t
  misc_feature (1146)..(1146): n is a, c, g, or t
  misc_feature (1152)..(1152): n is a, c, g, or t
  misc_feature (1155)..(1155): n is a, c, g, or t
  misc_feature (1158)..(1158): n is a, c, g, or t
  misc_feature (1161)..(1161): n is a, c, g, or t
  misc_feature (1164)..(1164): n is a, c, g, or t
  misc_feature (1167)..(1167): n is a, c, g, or t
  misc_feature (1173)..(1173): n is a, c, g, or t
  misc_feature (1179)..(1179): n is a, c, g, or t
  misc_feature (1182)..(1182): n is a, c, g, or t
  misc_feature (1185)..(1185): n is a, c, g, or t
  misc_feature (1188)..(1188): n is a, c, g, or t
  misc_feature (1191)..(1191): n is a, c, g, or t
  misc_feature (1194)..(1194): n is a, c, g, or t
  misc_feature (1197)..(1197): n is a, c, g, or t
  misc_feature (1200)..(1200): n is a, c, g, or t
  misc_feature (1203)..(1203): n is a, c, g, or t
  misc_feature (1206)..(1206): n is a, c, g, or t
  misc_feature (1209)..(1209): n is a, c, g, or t
  misc_feature (1212)..(1212): n is a, c, g, or t
  misc_feature (1215)..(1215): n is a, c, g, or t
  misc_feature (1218)..(1218): n is a, c, g, or t
  misc_feature (1224)..(1224): n is a, c, g, or t
  misc_feature (1227)..(1227): n is a, c, g, or t
  misc_feature (1230)..(1230): n is a, c, g, or t
  misc_feature (1236)..(1236): n is a, c, g, or t
  misc_feature (1242)..(1242): n is a, c, g, or t
  misc_feature (1245)..(1245): n is a, c, g, or t
  misc_feature (1248)..(1248): n is a, c, g, or t
  misc_feature (1254)..(1254): n is a, c, g, or t
  misc_feature (1263)..(1263): n is a, c, g, or t
  misc_feature (1266)..(1266): n is a, c, g, or t
  misc_feature (1269)..(1269): n is a, c, g, or t
  misc_feature (1272)..(1272): n is a, c, g, or t
  misc_feature (1281)..(1281): n is a, c, g, or t
  misc_feature (1287)..(1287): n is a, c, g, or t
  misc_feature (1290)..(1290): n is a, c, g, or t
  misc_feature (1293)..(1293): n is a, c, g, or t
  misc_feature (1296)..(1296): n is a, c, g, or t
  misc_feature (1299)..(1299): n is a, c, g, or t
  misc_feature (1302)..(1302): n is a, c, g, or t
  misc_feature (1305)..(1305): n is a, c, g, or t
  misc_feature (1308)..(1308): n is a, c, g, or t
  misc_feature (1311)..(1311): n is a, c, g, or t
  misc_feature (1317)..(1317): n is a, c, g, or t
  misc_feature (1320)..(1320): n is a, c, g, or t
  misc_feature (1323)..(1323): n is a, c, g, or t
  misc_feature (1326)..(1326): n is a, c, g, or t
  misc_feature (1335)..(1335): n is a, c, g, or t
  misc_feature (1341)..(1341): n is a, c, g, or t
  misc_feature (1344)..(1344): n is a, c, g, or t
  misc_feature (1347)..(1347): n is a, c, g, or t
  misc_feature (1353)..(1353): n is a, c, g, or t
  misc_feature (1356)..(1356): n is a, c, g, or t
  misc_feature (1359)..(1359): n is a, c, g, or t
  misc_feature (1362)..(1362): n is a, c, g, or t
  misc_feature (1365)..(1365): n is a, c, g, or t
  misc_feature (1368)..(1368): n is a, c, g, or t
  misc_feature (1371)..(1371): n is a, c, g, or t
  misc_feature (1374)..(1374): n is a, c, g, or t
  misc_feature (1377)..(1377): n is a, c, g, or t
  misc_feature (1380)..(1380): n is a, c, g, or t
  misc_feature (1389)..(1389): n is a, c, g, or t
  misc_feature (1395)..(1395): n is a, c, g, or t
  misc_feature (1398)..(1398): n is a, c, g, or t
  misc_feature (1401)..(1401): n is a, c, g, or t
  misc_feature (1404)..(1404): n is a, c, g, or t
  misc_feature (1407)..(1407): n is a, c, g, or t
  misc_feature (1410)..(1410): n is a, c, g, or t
  misc_feature (1416)..(1416): n is a, c, g, or t
  misc_feature (1419)..(1419): n is a, c, g, or t
  misc_feature (1425)..(1425): n is a, c, g, or t
  misc_feature (1428)..(1428): n is a, c, g, or t
  misc_feature (1431)..(1431): n is a, c, g, or t
  misc_feature (1434)..(1434): n is a, c, g, or t
  misc_feature (1437)..(1437): n is a, c, g, or t
  misc_feature (1440)..(1440): n is a, c, g, or t
  misc_feature (1443)..(1443): n is a, c, g, or t
  misc_feature (1446)..(1446): n is a, c, g, or t
  misc_feature (1449)..(1449): n is a, c, g, or t
  misc_feature (1452)..(1452): n is a, c, g, or t
  misc_feature (1461)..(1461): n is a, c, g, or t
  misc_feature (1467)..(1467): n is a, c, g, or t
  misc_feature (1470)..(1470): n is a, c, g, or t
  misc_feature (1476)..(1476): n is a, c, g, or t
  misc_feature (1479)..(1479): n is a, c, g, or t
  misc_feature (1482)..(1482): n is a, c, g, or t
  misc_feature (1488)..(1488): n is a, c, g, or t
  misc_feature (1494)..(1494): n is a, c, g, or t
  misc_feature (1497)..(1497): n is a, c, g, or t
  misc_feature (1500)..(1500): n is a, c, g, or t
  misc_feature (1503)..(1503): n is a, c, g, or t
  misc_feature (1506)..(1506): n is a, c, g, or t
  misc_feature (1509)..(1509): n is a, c, g, or t
  misc_feature (1512)..(1512): n is a, c, g, or t
  misc_feature (1515)..(1515): n is a, c, g, or t
  misc_feature (1518)..(1518): n is a, c, g, or t
  misc_feature (1524)..(1524): n is a, c, g, or t
  misc_feature (1530)..(1530): n is a, c, g, or t
  misc_feature (1533)..(1533): n is a, c, g, or t
  misc_feature (1536)..(1536): n is a, c, g, or t
  misc_feature (1539)..(1539): n is a, c, g, or t
  misc_feature (1542)..(1542): n is a, c, g, or t
  misc_feature (1548)..(1548): n is a, c, g, or t
  misc_feature (1551)..(1551): n is a, c, g, or t
  misc_feature (1554)..(1554): n is a, c, g, or t
  misc_feature (1557)..(1557): n is a, c, g, or t
  misc_feature (1560)..(1560): n is a, c, g, or t
  misc_feature (1563)..(1563): n is a, c, g, or t
  misc_feature (1566)..(1566): n is a, c, g, or t
  misc_feature (1569)..(1569): n is a, c, g, or t
  misc_feature (1572)..(1572): n is a, c, g, or t
  misc_feature (1575)..(1575): n is a, c, g, or t
  misc_feature (1578)..(1578): n is a, c, g, or t
  misc_feature (1581)..(1581): n is a, c, g, or t
  misc_feature (1584)..(1584): n is a, c, g, or t
  misc_feature (1587)..(1587): n is a, c, g, or t
  misc_feature (1590)..(1590): n is a, c, g, or t
  misc_feature (1593)..(1593): n is a, c, g, or t
  misc_feature (1596)..(1596): n is a, c, g, or t
  misc_feature (1599)..(1599): n is a, c, g, or t
  misc_feature (1602)..(1602): n is a, c, g, or t
  misc_feature (1605)..(1605): n is a, c, g, or t
  misc_feature (1608)..(1608): n is a, c, g, or t
  misc_feature (1614)..(1614): n is a, c, g, or t
  misc_feature (1617)..(1617): n is a, c, g, or t
  misc_feature (1623)..(1623): n is a, c, g, or t
  misc_feature (1626)..(1626): n is a, c, g, or t
  misc_feature (1629)..(1629): n is a, c, g, or t
  misc_feature (1632)..(1632): n is a, c, g, or t
  misc_feature (1635)..(1635): n is a, c, g, or t
  misc_feature (1638)..(1638): n is a, c, g, or t
  misc_feature (1641)..(1641): n is a, c, g, or t
  misc_feature (1644)..(1644): n is a, c, g, or t
  misc_feature (1647)..(1647): n is a, c, g, or t
  misc_feature (1650)..(1650): n is a, c, g, or t
  misc_feature (1653)..(1653): n is a, c, g, or t
  misc_feature (1656)..(1656): n is a, c, g, or t
  misc_feature (1659)..(1659): n is a, c, g, or t
  misc_feature (1662)..(1662): n is a, c, g, or t
  misc_feature (1665)..(1665): n is a, c, g, or t
  misc_feature (1668)..(1668): n is a, c, g, or t
  misc_feature (1671)..(1671): n is a, c, g, or t
  misc_feature (1677)..(1677): n is a, c, g, or t
  misc_feature (1683)..(1683): n is a, c, g, or t
  misc_feature (1686)..(1686): n is a, c, g, or t
  misc_feature (1692)..(1692): n is a, c, g, or t
  misc_feature (1695)..(1695): n is a, c, g, or t
  misc_feature (1698)..(1698): n is a, c, g, or t
  misc_feature (1701)..(1701): n is a, c, g, or t
  misc_feature (1704)..(1704): n is a, c, g, or t
  misc_feature (1707)..(1707): n is a, c, g, or t
  misc_feature (1710)..(1710): n is a, c, g, or t
  misc_feature (1713)..(1713): n is a, c, g, or t
  misc_feature (1716)..(1716): n is a, c, g, or t
  misc_feature (1722)..(1722): n is a, c, g, or t
  misc_feature (1731)..(1731): n is a, c, g, or t
  misc_feature (1737)..(1737): n is a, c, g, or t
  misc_feature (1740)..(1740): n is a, c, g, or t
  misc_feature (1743)..(1743): n is a, c, g, or t
  misc_feature (1746)..(1746): n is a, c, g, or t
  misc_feature (1749)..(1749): n is a, c, g, or t
  misc_feature (1752)..(1752): n is a, c, g, or t
  misc_feature (1758)..(1758): n is a, c, g, or t
  misc_feature (1761)..(1761): n is a, c, g, or t
  misc_feature (1764)..(1764): n is a, c, g, or t
  misc_feature (1767)..(1767): n is a, c, g, or t
  misc_feature (1776)..(1776): n is a, c, g, or t
  misc_feature (1779)..(1779): n is a, c, g, or t
  misc_feature (1782)..(1782): n is a, c, g, or t
  misc_feature (1785)..(1785): n is a, c, g, or t
  misc_feature (1788)..(1788): n is a, c, g, or t
  misc_feature (1791)..(1791): n is a, c, g, or t
  misc_feature (1794)..(1794): n is a, c, g, or t
  misc_feature (1797)..(1797): n is a, c, g, or t
  misc_feature (1803)..(1803): n is a, c, g, or t
  misc_feature (1806)..(1806): n is a, c, g, or t
  misc_feature (1809)..(1809): n is a, c, g, or t
  misc_feature (1812)..(1812): n is a, c, g, or t
  misc_feature (1815)..(1815): n is a, c, g, or t
  misc_feature (1818)..(1818): n is a, c, g, or t
  misc_feature (1821)..(1821): n is a, c, g, or t
  misc_feature (1827)..(1827): n is a, c, g, or t
  misc_feature (1830)..(1830): n is a, c, g, or t
  misc_feature (1839)..(1839): n is a, c, g, or t
  misc_feature (1845)..(1845): n is a, c, g, or t
  misc_feature (1848)..(1848): n is a, c, g, or t
  misc_feature (1851)..(1851): n is a, c, g, or t
  misc_feature (1854)..(1854): n is a, c, g, or t
  misc_feature (1857)..(1857): n is a, c, g, or t
  misc_feature (1860)..(1860): n is a, c, g, or t
  misc_feature (1863)..(1863): n is a, c, g, or t
  misc_feature (1866)..(1866): n is a, c, g, or t
  misc_feature (1872)..(1872): n is a, c, g, or t
  misc_feature (1875)..(1875): n is a, c, g, or t
  misc_feature (1878)..(1878): n is a, c, g, or t
  misc_feature (1881)..(1881): n is a, c, g, or t
  misc_feature (1884)..(1884): n is a, c, g, or t
  misc_feature (1887)..(1887): n is a, c, g, or t
  misc_feature (1890)..(1890): n is a, c, g, or t
  misc_feature (1893)..(1893): n is a, c, g, or t
  misc_feature (1899)..(1899): n is a, c, g, or t
  misc_feature (1902)..(1902): n is a, c, g, or t
  misc_feature (1908)..(1908): n is a, c, g, or t
  misc_feature (1911)..(1911): n is a, c, g, or t
  misc_feature (1914)..(1914): n is a, c, g, or t
  misc_feature (1917)..(1917): n is a, c, g, or t
  misc_feature (1920)..(1920): n is a, c, g, or t
  misc_feature (1923)..(1923): n is a, c, g, or t
  misc_feature (1926)..(1926): n is a, c, g, or t
  misc_feature (1929)..(1929): n is a, c, g, or t
  misc_feature (1935)..(1935): n is a, c, g, or t
  misc_feature (1938)..(1938): n is a, c, g, or t
  misc_feature (1941)..(1941): n is a, c, g, or t
  misc_feature (1944)..(1944): n is a, c, g, or t
  misc_feature (1947)..(1947): n is a, c, g, or t
  misc_feature (1956)..(1956): n is a, c, g, or t
  misc_feature (1962)..(1962): n is a, c, g, or t
  misc_feature (1965)..(1965): n is a, c, g, or t
  misc_feature (1968)..(1968): n is a, c, g, or t
  misc_feature (1974)..(1974): n is a, c, g, or t
  misc_feature (1980)..(1980): n is a, c, g, or t
  misc_feature (1983)..(1983): n is a, c, g, or t
  misc_feature (1986)..(1986): n is a, c, g, or t
  misc_feature (1989)..(1989): n is a, c, g, or t
  misc_feature (1992)..(1992): n is a, c, g, or t
  misc_feature (2001)..(2001): n is a, c, g, or t
  misc_feature (2007)..(2007): n is a, c, g, or t
  misc_feature (2010)..(2010): n is a, c, g, or t
  misc_feature (2013)..(2013): n is a, c, g, or t
  misc_feature (2016)..(2016): n is a, c, g, or t
  misc_feature (2019)..(2019): n is a, c, g, or t
  misc_feature (2022)..(2022): n is a, c, g, or t
  misc_feature (2025)..(2025): n is a, c, g, or t
  misc_feature (2028)..(2028): n is a, c, g, or t
  misc_feature (2031)..(2031): n is a, c, g, or t
  misc_feature (2034)..(2034): n is a, c, g, or t
  misc_feature (2037)..(2037): n is a, c, g, or t
  misc_feature (2040)..(2040): n is a, c, g, or t
  misc_feature (2043)..(2043): n is a, c, g, or t
  misc_feature (2046)..(2046): n is a, c, g, or t
  misc_feature (2049)..(2049): n is a, c, g, or t
  misc_feature (2052)..(2052): n is a, c, g, or t
  misc_feature (2055)..(2055): n is a, c, g, or t
  misc_feature (2058)..(2058): n is a, c, g, or t
  misc_feature (2061)..(2061): n is a, c, g, or t
  misc_feature (2064)..(2064): n is a, c, g, or t
  misc_feature (2067)..(2067): n is a, c, g, or t
  misc_feature (2073)..(2073): n is a, c, g, or t
  misc_feature (2076)..(2076): n is a, c, g, or t
  misc_feature (2082)..(2082): n is a, c, g, or t
  misc_feature (2088)..(2088): n is a, c, g, or t
  misc_feature (2091)..(2091): n is a, c, g, or t
  misc_feature (2094)..(2094): n is a, c, g, or t
  misc_feature (2097)..(2097): n is a, c, g, or t
  misc_feature (2100)..(2100): n is a, c, g, or t
  misc_feature (2103)..(2103): n is a, c, g, or t
  misc_feature (2106)..(2106): n is a, c, g, or t
  misc_feature (2109)..(2109): n is a, c, g, or t
  misc_feature (2112)..(2112): n is a, c, g, or t
  misc_feature (2115)..(2115): n is a, c, g, or t
  misc_feature (2118)..(2118): n is a, c, g, or t
  misc_feature (2124)..(2124): n is a, c, g, or t
  misc_feature (2127)..(2127): n is a, c, g, or t
  misc_feature (2130)..(2130): n is a, c, g, or t
  misc_feature (2133)..(2133): n is a, c, g, or t
  misc_feature (2136)..(2136): n is a, c, g, or t
  misc_feature (2139)..(2139): n is a, c, g, or t
  misc_feature (2142)..(2142): n is a, c, g, or t
  misc_feature (2145)..(2145): n is a, c, g, or t
  misc_feature (2148)..(2148): n is a, c, g, or t
  misc_feature (2151)..(2151): n is a, c, g, or t
  misc_feature (2154)..(2154): n is a, c, g, or t
  misc_feature (2157)..(2157): n is a, c, g, or t
  misc_feature (2163)..(2163): n is a, c, g, or t
  misc_feature (2169)..(2169): n is a, c, g, or t
  misc_feature (2172)..(2172): n is a, c, g, or t
  misc_feature (2175)..(2175): n is a, c, g, or t
  misc_feature (2178)..(2178): n is a, c, g, or t
  misc_feature (2181)..(2181): n is a, c, g, or t
  misc_feature (2184)..(2184): n is a, c, g, or t
  misc_feature (2187)..(2187): n is a, c, g, or t
  misc_feature (2190)..(2190): n is a, c, g, or t
  misc_feature (2193)..(2193): n is a, c, g, or t
  misc_feature (2196)..(2196): n is a, c, g, or t
  misc_feature (2199)..(2199): n is a, c, g, or t
  misc_feature (2208)..(2208): n is a, c, g, or t
  misc_feature (2211)..(2211): n is a, c, g, or t
  misc_feature (2214)..(2214): n is a, c, g, or t
  misc_feature (2217)..(2217): n is a, c, g, or t
  misc_feature (2220)..(2220): n is a, c, g, or t
  misc_feature (2223)..(2223): n is a, c, g, or t
  misc_feature (2226)..(2226): n is a, c, g, or t
  misc_feature (2232)..(2232): n is a, c, g, or t
  misc_feature (2235)..(2235): n is a, c, g, or t
  misc_feature (2238)..(2238): n is a, c, g, or t
  misc_feature (2241)..(2241): n is a, c, g, or t
  misc_feature (2244)..(2244): n is a, c, g, or t
  misc_feature (2247)..(2247): n is a, c, g, or t
  misc_feature (2250)..(2250): n is a, c, g, or t
  misc_feature (2253)..(2253): n is a, c, g, or t
  misc_feature (2256)..(2256): n is a, c, g, or t
  misc_feature (2259)..(2259): n is a, c, g, or t
  misc_feature (2262)..(2262): n is a, c, g, or t
  misc_feature (2265)..(2265): n is a, c, g, or t
  misc_feature (2271)..(2271): n is a, c, g, or t
  misc_feature (2277)..(2277): n is a, c, g, or t
  misc_feature (2280)..(2280): n is a, c, g, or t
  misc_feature (2286)..(2286): n is a, c, g, or t
  misc_feature (2289)..(2289): n is a, c, g, or t
  misc_feature (2298)..(2298): n is a, c, g, or t
  misc_feature (2301)..(2301): n is a, c, g, or t
  misc_feature (2304)..(2304): n is a, c, g, or t
  misc_feature (2307)..(2307): n is a, c, g, or t
  misc_feature (2310)..(2310): n is a, c, g, or t
  misc_feature (2316)..(2316): n is a, c, g, or t
  misc_feature (2319)..(2319): n is a, c, g, or t
  misc_feature (2322)..(2322): n is a, c, g, or t
  misc_feature (2325)..(2325): n is a, c, g, or t
  misc_feature (2328)..(2328): n is a, c, g, or t
  misc_feature (2331)..(2331): n is a, c, g, or t
  misc_feature (2334)..(2334): n is a, c, g, or t
  misc_feature (2337)..(2337): n is a, c, g, or t
  misc_feature (2340)..(2340): n is a, c, g, or t
  misc_feature (2343)..(2343): n is a, c, g, or t
  misc_feature (2349)..(2349): n is a, c, g, or t
  misc_feature (2352)..(2352): n is a, c, g, or t
  misc_feature (2358)..(2358): n is a, c, g, or t
  misc_feature (2361)..(2361): n is a, c, g, or t
  misc_feature (2364)..(2364): n is a, c, g, or t
  misc_feature (2367)..(2367): n is a, c, g, or t
  misc_feature (2370)..(2370): n is a, c, g, or t
  misc_feature (2373)..(2373): n is a, c, g, or t
  misc_feature (2376)..(2376): n is a, c, g, or t
  misc_feature (2379)..(2379): n is a, c, g, or t
  misc_feature (2382)..(2382): n is a, c, g, or t
  misc_feature (2385)..(2385): n is a, c, g, or t
  misc_feature (2388)..(2388): n is a, c, g, or t
  misc_feature (2394)..(2394): n is a, c, g, or t
  misc_feature (2397)..(2397): n is a, c, g, or t
  misc_feature (2400)..(2400): n is a, c, g, or t
  misc_feature (2403)..(2403): n is a, c, g, or t
  misc_feature (2406)..(2406): n is a, c, g, or t
  misc_feature (2409)..(2409): n is a, c, g, or t
  misc_feature (2412)..(2412): n is a, c, g, or t
  misc_feature (2415)..(2415): n is a, c, g, or t
  misc_feature (2418)..(2418): n is a, c, g, or t
  misc_feature (2424)..(2424): n is a, c, g, or t
  misc_feature (2427)..(2427): n is a, c, g, or t
  misc_feature (2433)..(2433): n is a, c, g, or t
  misc_feature (2439)..(2439): n is a, c, g, or t
  misc_feature (2442)..(2442): n is a, c, g, or t
  misc_feature (2448)..(2448): n is a, c, g, or t
  misc_feature (2451)..(2451): n is a, c, g, or t
  misc_feature (2454)..(2454): n is a, c, g, or t
  misc_feature (2460)..(2460): n is a, c, g, or t
  misc_feature (2463)..(2463): n is a, c, g, or t
  misc_feature (2466)..(2466): n is a, c, g, or t
  misc_feature (2469)..(2469): n is a, c, g, or t
  misc_feature (2475)..(2475): n is a, c, g, or t
  misc_feature (2478)..(2478): n is a, c, g, or t
  misc_feature (2481)..(2481): n is a, c, g, or t
  misc_feature (2484)..(2484): n is a, c, g, or t
  misc_feature (2487)..(2487): n is a, c, g, or t
  misc_feature (2490)..(2490): n is a, c, g, or t
  misc_feature (2496)..(2496): n is a, c, g, or t
  misc_feature (2499)..(2499): n is a, c, g, or t
  misc_feature (2502)..(2502): n is a, c, g, or t
  misc_feature (2505)..(2505): n is a, c, g, or t
  misc_feature (2508)..(2508): n is a, c, g, or t
  misc_feature (2511)..(2511): n is a, c, g, or t
  misc_feature (2514)..(2514): n is a, c, g, or t
  misc_feature (2517)..(2517): n is a, c, g, or t
  misc_feature (2520)..(2520): n is a, c, g, or t
  misc_feature (2523)..(2523): n is a, c, g, or t
  misc_feature (2529)..(2529): n is a, c, g, or t
  misc_feature (2532)..(2532): n is a, c, g, or t
  misc_feature (2535)..(2535): n is a, c, g, or t
  misc_feature (2541)..(2541): n is a, c, g, or t
  misc_feature (2547)..(2547): n is a, c, g, or t
  misc_feature (2550)..(2550): n is a, c, g, or t
  misc_feature (2553)..(2553): n is a, c, g, or t
  misc_feature (2559)..(2559): n is a, c, g, or t
  misc_feature (2562)..(2562): n is a, c, g, or t
  misc_feature (2565)..(2565): n is a, c, g, or t
  misc_feature (2568)..(2568): n is a, c, g, or t
  misc_feature (2571)..(2571): n is a, c, g, or t
  misc_feature (2577)..(2577): n is a, c, g, or t
  misc_feature (2580)..(2580): n is a, c, g, or t
  misc_feature (2583)..(2583): n is a, c, g, or t
  misc_feature (2586)..(2586): n is a, c, g, or t
  misc_feature (2589)..(2589): n is a, c, g, or t
  misc_feature (2595)..(2595): n is a, c, g, or t
  misc_feature (2601)..(2601): n is a, c, g, or t
  misc_feature (2604)..(2604): n is a, c, g, or t
  misc_feature (2613)..(2613): n is a, c, g, or t
  misc_feature (2616)..(2616): n is a, c, g, or t
  misc_feature (2619)..(2619): n is a, c, g, or t
  misc_feature (2622)..(2622): n is a, c, g, or t
  misc_feature (2625)..(2625): n is a, c, g, or t
  misc_feature (2628)..(2628): n is a, c, g, or t
  misc_feature (2631)..(2631): n is a, c, g, or t
  misc_feature (2634)..(2634): n is a, c, g, or t
  misc_feature (2637)..(2637): n is a, c, g, or t
  misc_feature (2640)..(2640): n is a, c, g, or t
  misc_feature (2646)..(2646): n is a, c, g, or t
  misc_feature (2649)..(2649): n is a, c, g, or t
  misc_feature (2652)..(2652): n is a, c, g, or t
  misc_feature (2655)..(2655): n is a, c, g, or t
  misc_feature (2658)..(2658): n is a, c, g, or t
  misc_feature (2661)..(2661): n is a, c, g, or t
  misc_feature (2664)..(2664): n is a, c, g, or t
  misc_feature (2667)..(2667): n is a, c, g, or t
  misc_feature (2670)..(2670): n is a, c, g, or t
  misc_feature (2673)..(2673): n is a, c, g, or t
  misc_feature (2676)..(2676): n is a, c, g, or t
  misc_feature (2682)..(2682): n is a, c, g, or t
  misc_feature (2685)..(2685): n is a, c, g, or t
  misc_feature (2691)..(2691): n is a, c, g, or t
  misc_feature (2694)..(2694): n is a, c, g, or t
  misc_feature (2700)..(2700): n is a, c, g, or t
  misc_feature (2703)..(2703): n is a, c, g, or t
  misc_feature (2706)..(2706): n is a, c, g, or t
  misc_feature (2709)..(2709): n is a, c, g, or t
  misc_feature (2712)..(2712): n is a, c, g, or t
  misc_feature (2715)..(2715): n is a, c, g, or t
  misc_feature (2718)..(2718): n is a, c, g, or t
  misc_feature (2721)..(2721): n is a, c, g, or t
  misc_feature (2724)..(2724): n is a, c, g, or t
  misc_feature (2727)..(2727): n is a, c, g, or t
  misc_feature (2730)..(2730): n is a, c, g, or t
  misc_feature (2733)..(2733): n is a, c, g, or t
  misc_feature (2736)..(2736): n is a, c, g, or t
  misc_feature (2739)..(2739): n is a, c, g, or t
  misc_feature (2742)..(2742): n is a, c, g, or t
  misc_feature (2745)..(2745): n is a, c, g, or t
  misc_feature (2748)..(2748): n is a, c, g, or t
  misc_feature (2751)..(2751): n is a, c, g, or t
  misc_feature (2754)..(2754): n is a, c, g, or t
  misc_feature (2757)..(2757): n is a, c, g, or t
  misc_feature (2760)..(2760): n is a, c, g, or t
  misc_feature (2766)..(2766): n is a, c, g, or t
  misc_feature (2769)..(2769): n is a, c, g, or t
  misc_feature (2772)..(2772): n is a, c, g, or t
  misc_feature (2775)..(2775): n is a, c, g, or t
  misc_feature (2784)..(2784): n is a, c, g, or t
  misc_feature (2790)..(2790): n is a, c, g, or t
  misc_feature (2793)..(2793): n is a, c, g, or t
  misc_feature (2799)..(2799): n is a, c, g, or t
  misc_feature (2802)..(2802): n is a, c, g, or t
  misc_feature (2805)..(2805): n is a, c, g, or t
  misc_feature (2808)..(2808): n is a, c, g, or t
  misc_feature (2811)..(2811): n is a, c, g, or t
  misc_feature (2820)..(2820): n is a, c, g, or t
  misc_feature (2826)..(2826): n is a, c, g, or t
  misc_feature (2829)..(2829): n is a, c, g, or t
  misc_feature (2835)..(2835): n is a, c, g, or t
  misc_feature (2838)..(2838): n is a, c, g, or t
  misc_feature (2844)..(2844): n is a, c, g, or t
  misc_feature (2847)..(2847): n is a, c, g, or t
  misc_feature (2850)..(2850): n is a, c, g, or t
  misc_feature (2853)..(2853): n is a, c, g, or t
  misc_feature (2856)..(2856): n is a, c, g, or t
  misc_feature (2859)..(2859): n is a, c, g, or t
  misc_feature (2862)..(2862): n is a, c, g, or t
  misc_feature (2865)..(2865): n is a, c, g, or t
  misc_feature (2868)..(2868): n is a, c, g, or t
  misc_feature (2871)..(2871): n is a, c, g, or t
  misc_feature (2874)..(2874): n is a, c, g, or t
  misc_feature (2883)..(2883): n is a, c, g, or t
  misc_feature (2886)..(2886): n is a, c, g, or t
  misc_feature (2892)..(2892): n is a, c, g, or t
  misc_feature (2895)..(2895): n is a, c, g, or t
  misc_feature (2898)..(2898): n is a, c, g, or t
  misc_feature (2901)..(2901): n is a, c, g, or t
  misc_feature (2904)..(2904): n is a, c, g, or t
  misc_feature (2907)..(2907): n is a, c, g, or t
  misc_feature (2910)..(2910): n is a, c, g, or t
  misc_feature (2913)..(2913): n is a, c, g, or t
  misc_feature (2916)..(2916): n is a, c, g, or t
  misc_feature (2919)..(2919): n is a, c, g, or t
  misc_feature (2922)..(2922): n is a, c, g, or t
  misc_feature (2925)..(2925): n is a, c, g, or t
  misc_feature (2928)..(2928): n is a, c, g, or t
  misc_feature (2931)..(2931): n is a, c, g, or t
  misc_feature (2934)..(2934): n is a, c, g, or t
  misc_feature (2937)..(2937): n is a, c, g, or t
  misc_feature (2940)..(2940): n is a, c, g, or t
  misc_feature (2943)..(2943): n is a, c, g, or t
  misc_feature (2946)..(2946): n is a, c, g, or t
  misc_feature (2955)..(2955): n is a, c, g, or t
  misc_feature (2958)..(2958): n is a, c, g, or t
  misc_feature (2961)..(2961): n is a, c, g, or t
  misc_feature (2964)..(2964): n is a, c, g, or t
  misc_feature (2970)..(2970): n is a, c, g, or t
  misc_feature (2973)..(2973): n is a, c, g, or t
  misc_feature (2976)..(2976): n is a, c, g, or t
  misc_feature (2982)..(2982): n is a, c, g, or t
  misc_feature (2985)..(2985): n is a, c, g, or t
  misc_feature (2988)..(2988): n is a, c, g, or t
  misc_feature (2991)..(2991): n is a, c, g, or t
  misc_feature (2994)..(2994): n is a, c, g, or t
  misc_feature (2997)..(2997): n is a, c, g, or t
  misc_feature (3000)..(3000): n is a, c, g, or t
  misc_feature (3006)..(3006): n is a, c, g, or t
  misc_feature (3009)..(3009): n is a, c, g, or t
  misc_feature (3015)..(3015): n is a, c, g, or t
  misc_feature (3018)..(3018): n is a, c, g, or t
  misc_feature (3021)..(3021): n is a, c, g, or t
  misc_feature (3027)..(3027): n is a, c, g, or t
  misc_feature (3030)..(3030): n is a, c, g, or t
  misc_feature (3033)..(3033): n is a, c, g, or t
  misc_feature (3036)..(3036): n is a, c, g, or t
  misc_feature (3042)..(3042): n is a, c, g, or t
  misc_feature (3045)..(3045): n is a, c, g, or t
  misc_feature (3051)..(3051): n is a, c, g, or t
  misc_feature (3054)..(3054): n is a, c, g, or t
  misc_feature (3057)..(3057): n is a, c, g, or t
  misc_feature (3060)..(3060): n is a, c, g, or t
  misc_feature (3063)..(3063): n is a, c, g, or t
  misc_feature (3066)..(3066): n is a, c, g, or t
  misc_feature (3069)..(3069): n is a, c, g, or t
  misc_feature (3072)..(3072): n is a, c, g, or t
  misc_feature (3075)..(3075): n is a, c, g, or t
  misc_feature (3078)..(3078): n is a, c, g, or t
  misc_feature (3081)..(3081): n is a, c, g, or t
  misc_feature (3084)..(3084): n is a, c, g, or t
ggnytngcnggntayccnggnccngcnggnccnccnggnccnccnggnccnccnggnacnwsnggncayccnggnwsnccnggnwsnccnggntaycarggnccnccnggngarccnggncargcnggnccnwsnggnccnccnggnccnccnggngcnathggnccnwsnggnccngcnggnaargayggngarwsnggnmgnccnggnmgnccnggngarmgnggnytnccnggnccnccnggnathaarggnccngcnggnathccnggnttyccnggnatgaarggncaymgnggnttygayggnmgnaayggngaraarggngaracnggngcnccnggnytnaarggngaraayggnytnccnggngaraayggngcnccnggnccnatgggnccnmgnggngcnccnggngarmgnggnmgnccnggnytnccnggngcngcnggngcnmgnggnaaygayggngcnmgnggnwsngayggncarccnggnccnccnggnccnccnggnacngcnggnttyccnggnwsnccnggngcnaarggngargtnggnccngcnggnwsnccnggnwsnaayggngcnccnggncarmgnggngarccnggnccncarggncaygcnggngcncarggnccnccnggnccnccnggnathaayggnwsnccnggnggnaarggngaratgggnccngcnggnathccnggngcnccnggnytnatgggngcnmgnggnccnccnggnccngcnggngcnaayggngcnccnggnytnmgnggnggngcnggngarccnggnaaraayggngcnaarggngarccnggnccnmgnggngarmgnggngargcnggnathccnggngtnccnggngcnaarggngargayggnaargayggnwsnccnggngarccnggngcnaayggnytnccnggngcngcnggngarmgnggngcnccnggnttymgnggnccngcnggnccnaayggnathccnggngaraarggnccngcnggngarmgnggngcnccnggnccngcnggnccnmgnggngcngcnggngarccnggnmgngayggngtnccnggnggnccnggnatgmgnggnatgccnggnwsnccnggnggnccnggnwsngayggnaarccnggnccnccnggnwsncarggngarwsnggnmgnccnggnccnccnggnccnwsnggnccnmgnggncarccnggngtnatgggnttyccnggnccnaarggnaaygayggngcnccnggnaaraayggngarmgnggnggnccnggnggnccnggnccncarggnccnccnggnaaraayggngaracnggnccncarggnccnccnggnccnacnggnccnggnggngayaarggngayacnggnccnccnggnccncarggnytncarggnytnccnggnacnggnggnccnccnggngaraayggnaarccnggngarccnggnccnaarggngaygcnggngcnccnggngcnccnggnggnaarggngaygcnggngcnccnggngarmgnggnccnccnggnytngcnggngcnccnggnytnmgnggnggngcnggnccnccnggnccngarggnggnaarggngcngcnggnccnccnggnccnccnggngcngcnggnacnccnggnytncarggnatgccnggngarmgnggnggnytnggnwsnccnggnccnaarggngayaarggngarccnggnggnccnggngcngayggngtnccnggnaargayggnccnmgnggnccnacnggnccnathggnccnccnggnccngcnggncarccnggngayaarggngarggnggngcnccnggnytnccnggnathgcnggnccnmgnggnwsnccnggngarmgnggngaracnggnccnccnggnccngcnggnttyccnggngcnccnggncaraayggngarccnggnggnaarggngarmgnggngcnccnggngaraarggngarggnggnccnccnggngtngcnggnccnccnggnggnwsnggnccngcnggnccnccnggnccncarggngtnaarggngarmgnggnwsnccnggnggnccnggngcngcnggnttyccnggngcnmgnggnytnccnggnccnccnggnwsnaayggnaayccnggnccnccnggnccnwsnggnwsnccnggnaargayggnccnccnggnccngcnggnaayacnggngcnccnggnwsnccnggngtnwsnggnccnaarggngaygcnggncarccnggngaraarggnwsnccnggngcncarggnccnccnggngcnccnggnccnytnggnathgcnggnathacnggngcnmgnggnytngcnggnccnccnggnatgccnggnccnmgnggnwsnccnggnccncarggngtnaarggngarwsnggnaarccnggngcnaayggnytnwsnggngarmgnggnccnccnggnccncarggnytnccnggnytngcnggnacngcnggngarccnggnmgngayggnaayccnggnwsngayggnytnccnggnmgngayggnwsnccnggnggnaarggngaymgnggngaraayggnwsnccnggngcnccnggngcnccnggncayccnggnccnccnggnccngtnggnccngcnggnaarwsnggngaymgnggngarwsnggnccngcnggnccngcnggngcnccnggnccngcnggnwsnmgnggngcnccnggnccncarggnccnmgnggngayaarggngaracnggngarmgnggngcngcnggnathaarggncaymgnggnttyccnggnaayccnggngcnccnggnwsnccnggnccngcnggncarcarggngcnathggnwsnccnggnccngcnggnccnmgnggnccngtnggnccnwsnggnccnccnggnaargayggnacnwsnggncayccnggnccnathggnccnccnggnccnmgnggnaaymgnggngarmgnggnwsngarggnwsnccnggncayccnggncarccnggnccnccnggnccnccnggngcnccnggnccntgy

SEQ ID NO: 1100 - DNA, 3804 bp, Artificial Sequence
  hCol-CNA05 (alpha1(IV) THD)
  misc_feature (3)..(3): n is a, c, g, or t
  misc_feature (9)..(9): n is a, c, g, or t
  misc_feature (12)..(12): n is a, c, g, or t
  misc_feature (18)..(18): n is a, c, g, or t
  misc_feature (21)..(21): n is a, c, g, or t
  misc_feature (27)..(27): n is a, c, g, or t
  misc_feature (30)..(30): n is a, c, g, or t
  misc_feature (33)..(33): n is a, c, g, or t
  misc_feature (36)..(36): n is a, c, g, or t
  misc_feature (39)..(39): n is a, c, g, or t
  misc_feature (42)..(42): n is a, c, g, or t
  misc_feature (45)..(45): n is a, c, g, or t
  misc_feature (48)..(48): n is a, c, g, or t
  misc_feature (51)..(51): n is a, c, g, or t
  misc_feature (54)..(54): n is a, c, g, or t
  misc_feature (57)..(57): n is a, c, g, or t
  misc_feature (60)..(60): n is a, c, g, or t
  misc_feature (66)..(66): n is a, c, g, or t
  misc_feature (69)..(69): n is a, c, g, or t
  misc_feature (72)..(72): n is a, c, g, or t
  misc_feature (75)..(75): n is a, c, g, or t
  misc_feature (78)..(78): n is a, c, g, or t
  misc_feature (81)..(81): n is a, c, g, or t
  misc_feature (84)..(84): n is a, c, g, or t
  misc_feature (90)..(90): n is a, c, g, or t
  misc_feature (93)..(93): n is a, c, g, or t
  misc_feature (96)..(96): n is a, c, g, or t
  misc_feature (99)..(99): n is a, c, g, or t
  misc_feature (102)..(102): n is a, c, g, or t
  misc_feature (105)..(105): n is a, c, g, or t
  misc_feature (108)..(108): n is a, c, g, or t
  misc_feature (111)..(111): n is a, c, g, or t
  misc_feature (114)..(114): n is a, c, g, or t
  misc_feature (117)..(117): n is a, c, g, or t
  misc_feature (120)..(120): n is a, c, g, or t
  misc_feature (123)..(123): n is a, c, g, or t
  misc_feature (126)..(126): n is a, c, g, or t
  misc_feature (129)..(129): n is a, c, g, or t
  misc_feature (138)..(138): n is a, c, g, or t
  misc_feature (147)..(147): n is a, c, g, or t
  misc_feature (150)..(150): n is a, c, g, or t
  misc_feature (153)..(153): n is a, c, g, or t
  misc_feature (162)..(162): n is a, c, g, or t
  misc_feature (165)..(165): n is a, c, g, or t
  misc_feature (171)..(171): n is a, c, g, or t
  misc_feature (180)..(180): n is a, c, g, or t
  misc_feature (189)..(189): n is a, c, g, or t
  misc_feature (192)..(192): n is a, c, g, or t
  misc_feature (195)..(195): n is a, c, g, or t
  misc_feature (198)..(198): n is a, c, g, or t
  misc_feature (201)..(201): n is a, c, g, or t
  misc_feature (204)..(204): n is a, c, g, or t
  misc_feature (207)..(207): n is a, c, g, or t
  misc_feature (210)..(210): n is a, c, g, or t
  misc_feature (213)..(213): n is a, c, g, or t
  misc_feature (216)..(216): n is a, c, g, or t
  misc_feature (222)..(222): n is a, c, g, or t
  misc_feature (228)..(228): n is a, c, g, or t
  misc_feature (240)..(240): n is a, c, g, or t
  misc_feature (249)..(249): n is a, c, g, or t
  misc_feature (252)..(252): n is a, c, g, or t
  misc_feature (258)..(258): n is a, c, g, or t
  misc_feature (267)..(267): n is a, c, g, or t
  misc_feature (276)..(276): n is a, c, g, or t
  misc_feature (282)..(282): n is a, c, g, or t
  misc_feature (285)..(285): n is a, c, g, or t
  misc_feature (294)..(294): n is a, c, g, or t
  misc_feature (300)..(300): n is a, c, g, or t
  misc_feature (303)..(303): n is a, c, g, or t
  misc_feature (306)..(306): n is a, c, g, or t
  misc_feature (309)..(309): n is a, c, g, or t
  misc_feature (318)..(318): n is a, c, g, or t
  misc_feature (324)..(324): n is a, c, g, or t
  misc_feature (327)..(327): n is a, c, g, or t
  misc_feature (333)..(333): n is a, c, g, or t
  misc_feature (336)..(336): n is a, c, g, or t
  misc_feature (339)..(339): n is a, c, g, or t
  misc_feature (342)..(342): n is a, c, g, or t
  misc_feature (345)..(345): n is a, c, g, or t
  misc_feature (351)..(351): n is a, c, g, or t
  misc_feature (354)..(354): n is a, c, g, or t
  misc_feature (363)..(363): n is a, c, g, or t
  misc_feature (372)..(372): n is a, c, g, or t
  misc_feature (381)..(381): n is a, c, g, or t
  misc_feature (384)..(384): n is a, c, g, or t
  misc_feature (387)..(387): n is a, c, g, or t
  misc_feature (390)..(390): n is a, c, g, or t
  misc_feature (396)..(396): n is a, c, g, or t
  misc_feature (399)..(399): n is a, c, g, or t
  misc_feature (405)..(405): n is a, c, g, or t
  misc_feature (408)..(408): n is a, c, g, or t
  misc_feature (414)..(414): n is a, c, g, or t
  misc_feature (417)..(417): n is a, c, g, or t
  misc_feature (420)..(420): n is a, c, g, or t
  misc_feature (426)..(426): n is a, c, g, or t
  misc_feature (429)..(429): n is a, c, g, or t
  misc_feature (435)..(435): n is a, c, g, or t
  misc_feature (438)..(438): n is a, c, g, or t
  misc_feature (444)..(444): n is a, c, g, or t
  misc_feature (453)..(453): n is a, c, g, or t
  misc_feature (459)..(459): n is a, c, g, or t
  misc_feature (462)..(462): n is a, c, g, or t
  misc_feature (465)..(465): n is a, c, g, or t
  misc_feature (468)..(468): n is a, c, g, or t
  misc_feature (471)..(471): n is a, c, g, or t
  misc_feature (474)..(474): n is a, c, g, or t
  misc_feature (477)..(477): n is a, c, g, or t
  misc_feature (480)..(480): n is a, c, g, or t
  misc_feature (486)..(486): n is a, c, g, or t
  misc_feature (492)..(492): n is a, c, g, or t
  misc_feature (495)..(495): n is a, c, g, or t
  misc_feature (498)..(498): n is a, c, g, or t
  misc_feature (501)..(501): n is a, c, g, or t
  misc_feature (504)..(504): n is a, c, g, or t
  misc_feature (507)..(507): n is a, c, g, or t
  misc_feature (516)..(516): n is a, c, g, or t
  misc_feature (522)..(522): n is a, c, g, or t
  misc_feature (525)..(525): n is a, c, g, or t
  misc_feature (531)..(531): n is a, c, g, or t
  misc_feature (534)..(534): n is a, c, g, or t
  misc_feature (537)..(537): n is a, c, g, or t
  misc_feature (540)..(540): n is a, c, g, or t
  misc_feature (543)..(543): n is a, c, g, or t
  misc_feature (546)..(546): n is a, c, g, or t
  misc_feature (549)..(549): n is a, c, g, or t
  misc_feature (552)..(552): n is a, c, g, or t
  misc_feature (558)..(558): n is a, c, g, or t
  misc_feature (561)..(561): n is a, c, g, or t
  misc_feature (564)..(564): n is a, c, g, or t
  misc_feature (570)..(570): n is a, c, g, or t
  misc_feature (576)..(576): n is a, c, g, or t
  misc_feature (579)..(579): n is a, c, g, or t
  misc_feature (582)..(582): n is a, c, g, or t
  misc_feature (585)..(585): n is a, c, g, or t
  misc_feature (588)..(588): n is a, c, g, or t
  misc_feature (594)..(594): n is a, c, g, or t
  misc_feature (597)..(597): n is a, c, g, or t
  misc_feature (600)..(600): n is a, c, g, or t
  misc_feature (603)..(603): n is a, c, g, or t
  misc_feature (606)..(606): n is a, c, g, or t
  misc_feature (609)..(609): n is a, c, g, or t
  misc_feature (612)..(612): n is a, c, g, or t
  misc_feature (615)..(615): n is a, c, g, or t
  misc_feature (618)..(618): n is a, c, g, or t
  misc_feature (621)..(621): n is a, c, g, or t
  misc_feature (627)..(627): n is a, c, g, or t
  misc_feature (630)..(630): n is a, c, g, or t
  misc_feature (633)..(633): n is a, c, g, or t
  misc_feature (636)..(636): n is a, c, g, or t
  misc_feature (639)..(639): n is a, c, g, or t
  misc_feature (645)..(645): n is a, c, g, or t
  misc_feature (648)..(648): n is a, c, g, or t
  misc_feature (654)..(654): n is a, c, g, or t
  misc_feature (657)..(657): n is a, c, g, or t
  misc_feature (666)..(666): n is a, c, g, or t
  misc_feature (672)..(672): n is a, c, g, or t
  misc_feature (675)..(675): n is a, c, g, or t
  misc_feature (681)..(681): n is a, c, g, or t
  misc_feature (684)..(684): n is a, c, g, or t
  misc_feature (687)..(687): n is a, c, g, or t
  misc_feature (690)..(690): n is a, c, g, or t
  misc_feature (693)..(693): n is a, c, g, or t
  misc_feature (696)..(696): n is a, c, g, or t
  misc_feature (699)..(699): n is a, c, g, or t
  misc_feature (702)..(702): n is a, c, g, or t
  misc_feature (705)..(705): n is a, c, g, or t
  misc_feature (708)..(708): n is a, c, g, or t
  misc_feature (711)..(711): n is a, c, g, or t
  misc_feature (717)..(717): n is a, c, g, or t
  misc_feature (720)..(720): n is a, c, g, or t
  misc_feature (723)..(723): n is a, c, g, or t
  misc_feature (726)..(726): n is a, c, g, or t
  misc_feature (729)..(729): n is a, c, g, or t
  misc_feature (732)..(732): n is a, c, g, or t
  misc_feature (735)..(735): n is a, c, g, or t
  misc_feature (738)..(738): n is a, c, g, or t
  misc_feature (741)..(741): n is a, c, g, or t
  misc_feature (744)..(744): n is a, c, g, or t
  misc_feature (747)..(747): n is a, c, g, or t
  misc_feature (750)..(750): n is a, c, g, or t
  misc_feature (753)..(753): n is a, c, g, or t
  misc_feature (759)..(759): n is a, c, g, or t
  misc_feature (762)..(762): n is a, c, g, or t
  misc_feature (768)..(768): n is a, c, g, or t
  misc_feature (774)..(774): n is a, c, g, or t
  misc_feature (780)..(780): n is a, c, g, or t
  misc_feature (792)..(792): n is a, c, g, or t
  misc_feature (795)..(795): n is a, c, g, or t
  misc_feature (798)..(798): n is a, c, g, or t
  misc_feature (801)..(801): n is a, c, g, or t
  misc_feature (804)..(804): n is a, c, g, or t
  misc_feature (813)..(813): n is a, c, g, or t
  misc_feature (816)..(816): n is a, c, g, or t
  misc_feature (819)..(819): n is a, c, g, or t
  misc_feature (822)..(822): n is a, c, g, or t
  misc_feature (828)..(828): n is a, c, g, or t
  misc_feature (831)..(831): n is a, c, g, or t
  misc_feature (837)..(837): n is a, c, g, or t
  misc_feature (840)..(840): n is a, c, g, or t
  misc_feature (849)..(849): n is a, c, g, or t
  misc_feature (858)..(858): n is a, c, g, or t
  misc_feature (867)..(867): n is a, c, g, or t
  misc_feature (876)..(876): n is a, c, g, or t
  misc_feature (882)..(882): n is a, c, g, or t
  misc_feature (888)..(888): n is a, c, g, or t
  misc_feature (906)..(906): n is a, c, g, or t
  misc_feature (912)..(912): n is a, c, g, or t
  misc_feature (915)..(915): n is a, c, g, or t
  misc_feature (918)..(918): n is a, c, g, or t
  misc_feature (921)..(921): n is a, c, g, or t
  misc_feature (924)..(924): n is a, c, g, or t
  misc_feature (927)..(927): n is a, c, g, or t
  misc_feature (933)..(933): n is a, c, g, or t
  misc_feature (936)..(936): n is a, c, g, or t
  misc_feature (939)..(939): n is a, c, g, or t
  misc_feature (942)..(942): n is a, c, g, or t
  misc_feature (951)..(951): n is a, c, g, or t
  misc_feature (957)..(957): n is a, c, g, or t
  misc_feature (960)..(960): n is a, c, g, or t
  misc_feature (966)..(966): n is a, c, g, or t
  misc_feature (969)..(969): n is a, c, g, or t
  misc_feature (972)..(972): n is a, c, g, or t
  misc_feature (978)..(978): n is a, c, g, or t
  misc_feature (984)..(984): n is a, c, g, or t
  misc_feature (987)..(987): n is a, c, g, or t
  misc_feature (990)..(990): n is a, c, g, or t
  misc_feature (993)..(993): n is a, c, g, or t
  misc_feature (996)..(996): n is a, c, g, or t
  misc_feature (999)..(999): n is a, c, g, or t
  misc_feature (1005)..(1005): n is a, c, g, or t
  misc_feature (1008)..(1008): n is a, c, g, or t
  misc_feature (1011)..(1011): n is a, c, g, or t
  misc_feature (1014)..(1014): n is a, c, g, or t
  misc_feature (1017)..(1017): n is a, c, g, or t
  misc_feature (1020)..(1020): n is a, c, g, or t
  misc_feature (1023)..(1023): n is a, c, g, or t
  misc_feature (1026)..(1026): n is a, c, g, or t
  misc_feature (1032)..(1032): n is a, c, g, or t
  misc_feature (1035)..(1035): n is a, c, g, or t
  misc_feature (1038)..(1038): n is a, c, g, or t
  misc_feature (1041)..(1041): n is a, c, g, or t
  misc_feature (1044)..(1044): n is a, c, g, or t
  misc_feature (1050)..(1050): n is a, c, g, or t
  misc_feature (1056)..(1056): n is a, c, g, or t
  misc_feature (1059)..(1059): n is a, c, g, or t
  misc_feature (1062)..(1062): n is a, c, g, or t
  misc_feature (1068)..(1068): n is a, c, g, or t
  misc_feature (1074)..(1074): n is a, c, g, or t
  misc_feature (1077)..(1077): n is a, c, g, or t
  misc_feature (1095)..(1095): n is a, c, g, or t
  misc_feature (1098)..(1098): n is a, c, g, or t
  misc_feature (1101)..(1101): n is a, c, g, or t
  misc_feature (1107)..(1107): n is a, c, g, or t
  misc_feature (1116)..(1116): n is a, c, g, or t
  misc_feature (1122)..(1122): n is a, c, g, or t
  misc_feature (1125)..(1125): n is a, c, g, or t
  misc_feature (1131)..(1131): n is a, c, g, or t
  misc_feature (1134)..(1134): n is a, c, g, or t
  misc_feature (1140)..(1140): n is a, c, g, or t
  misc_feature (1143)..(1143): n is a, c, g, or t
  misc_feature (1149)..(1149): n is a, c, g, or t
  misc_feature (1152)..(1152): n is a, c, g, or t
  misc_feature (1155)..(1155): n is a, c, g, or t
  misc_feature (1158)..(1158): n is a, c, g, or t
  misc_feature (1161)..(1161): n is a, c, g, or t
  misc_feature (1164)..(1164): n is a, c, g, or t
  misc_feature (1167)..(1167): n is a, c, g, or t
  misc_feature (1170)..(1170): n is a, c, g, or t
  misc_feature (1173)..(1173): n is a, c, g, or t
  misc_feature (1179)..(1179): n is a, c, g, or t
  misc_feature (1185)..(1185): n is a, c, g, or t
  misc_feature (1188)..(1188): n is a, c, g, or t
  misc_feature (1191)..(1191): n is a, c, g, or t
  misc_feature (1194)..(1194): n is a, c, g, or t
  misc_feature (1197)..(1197): n is a, c, g, or t
  misc_feature (1200)..(1200): n is a, c, g, or t
  misc_feature (1206)..(1206): n is a, c, g, or t
  misc_feature (1209)..(1209): n is a, c, g, or t
  misc_feature (1212)..(1212): n is a, c, g, or t
  misc_feature (1215)..(1215): n is a, c, g, or t
  misc_feature (1218)..(1218): n is a, c, g, or t
  misc_feature (1221)..(1221): n is a, c, g, or t
  misc_feature (1224)..(1224): n is a, c, g, or t
  misc_feature (1227)..(1227): n is a, c, g, or t
  misc_feature (1233)..(1233): n is a, c, g, or t
  misc_feature (1239)..(1239): n is a, c, g, or t
  misc_feature (1242)..(1242): n is a, c, g, or t
  misc_feature (1245)..(1245): n is a, c, g, or t
  misc_feature (1248)..(1248): n is a, c, g, or t
  misc_feature (1251)..(1251): n is a, c, g, or t
  misc_feature (1254)..(1254): n is a, c, g, or t
  misc_feature (1257)..(1257): n is a, c, g, or t
  misc_feature (1260)..(1260): n is a, c, g, or t
  misc_feature (1266)..(1266): n is a, c, g, or t
  misc_feature (1269)..(1269): n is a, c, g, or t
  misc_feature (1272)..(1272): n is a, c, g, or t
  misc_feature (1275)..(1275): n is a, c, g, or t
  misc_feature (1278)..(1278): n is a, c, g, or t
  misc_feature (1284)..(1284): n is a, c, g, or t
  misc_feature (1287)..(1287): n is a, c, g, or t
  misc_feature (1290)..(1290): n is a, c, g, or t
  misc_feature (1293)..(1293): n is a, c, g, or t
  misc_feature (1296)..(1296): n is a, c, g, or t
  misc_feature (1299)..(1299): n is a, c, g, or t
  misc_feature (1302)..(1302): n is a, c, g, or t
  misc_feature (1305)..(1305): n is a, c, g, or t
  misc_feature (1311)..(1311): n is a, c, g, or t
  misc_feature (1314)..(1314): n is a, c, g, or t
  misc_feature (1317)..(1317): n is a, c, g, or t
  misc_feature (1320)..(1320): n is a, c, g, or t
  misc_feature (1323)..(1323): n is a, c, g, or t
  misc_feature (1329)..(1329): n is a, c, g, or t
  misc_feature (1338)..(1338): n is a, c, g, or t
  misc_feature (1344)..(1344): n is a, c, g, or t
  misc_feature (1347)..(1347): n is a, c, g, or t
  misc_feature (1353)..(1353): n is a, c, g, or t
  misc_feature (1356)..(1356): n is a, c, g, or t
  misc_feature (1359)..(1359): n is a, c, g, or t
  misc_feature (1362)..(1362): n is a, c, g, or t
  misc_feature (1365)..(1365): n is a, c, g, or t
  misc_feature (1368)..(1368): n is a, c, g, or t
  misc_feature (1371)..(1371): n is a, c, g, or t
  misc_feature (1374)..(1374): n is a, c, g, or t
  misc_feature (1377)..(1377): n is a, c, g, or t
  misc_feature (1380)..(1380): n is a, c, g, or t
  misc_feature (1383)..(1383): n is a, c, g, or t
  misc_feature (1386)..(1386): n is a, c, g, or t
  misc_feature (1392)..(1392): n is a, c, g, or t
  misc_feature (1398)..(1398): n is a, c, g, or t
  misc_feature (1401)..(1401): n is a, c, g, or t
  misc_feature (1410)..(1410): n is a, c, g, or t
  misc_feature (1413)..(1413): n is a, c, g, or t
  misc_feature (1416)..(1416): n is a, c, g, or t
  misc_feature (1419)..(1419): n is a, c, g, or t
  misc_feature (1422)..(1422): n is a, c, g, or t
  misc_feature (1425)..(1425): n is a, c, g, or t
  misc_feature (1428)..(1428): n is a, c, g, or t
  misc_feature (1431)..(1431): n is a, c, g, or t
  misc_feature (1434)..(1434): n is a, c, g, or t
  misc_feature (1440)..(1440): n is a, c, g, or t
  misc_feature (1443)..(1443): n is a, c, g, or t
  misc_feature (1446)..(1446): n is a, c, g, or t
  misc_feature (1449)..(1449): n is a, c, g, or t
  misc_feature (1452)..(1452): n is a, c, g, or t
  misc_feature (1455)..(1455): n is a, c, g, or t
  misc_feature (1458)..(1458): n is a, c, g, or t
  misc_feature (1464)..(1464): n is a, c, g, or t
  misc_feature (1467)..(1467): n is a, c, g, or t
  misc_feature (1470)..(1470): n is a, c, g, or t
  misc_feature (1476)..(1476): n is a, c, g, or t
  misc_feature (1482)..(1482): n is a, c, g, or t
  misc_feature (1485)..(1485): n is a, c, g, or t
  misc_feature (1491)..(1491): n is a, c, g, or t
  misc_feature (1494)..(1494): n is a, c, g, or t
  misc_feature (1497)..(1497): n is a, c, g, or t
  misc_feature (1500)..(1500): n is a, c, g, or t
  misc_feature (1503)..(1503): n is a, c, g, or t
  misc_feature (1506)..(1506): n is a, c, g, or t
  misc_feature (1509)..(1509): n is a, c, g, or t
  misc_feature (1512)..(1512): n is a, c, g, or t
  misc_feature (1515)..(1515): n is a, c, g, or t
  misc_feature (1518)..(1518): n is a, c, g, or t
  misc_feature (1521)..(1521): n is a, c, g, or t
  misc_feature (1530)..(1530): n is a, c, g, or t
  misc_feature (1533)..(1533): n is a, c, g, or t
  misc_feature (1536)..(1536): n is a, c, g, or t
  misc_feature (1539)..(1539): n is a, c, g, or t
  misc_feature (1545)..(1545): n is a, c, g, or t
  misc_feature (1548)..(1548): n is a, c, g, or t
  misc_feature (1554)..(1554): n is a, c, g, or t
  misc_feature (1560)..(1560): n is a, c, g, or t
  misc_feature (1563)..(1563): n is a, c, g, or t
  misc_feature (1566)..(1566): n is a, c, g, or t
  misc_feature (1569)..(1569): n is a, c, g, or t
  misc_feature (1572)..(1572): n is a, c, g, or t
  misc_feature (1575)..(1575): n is a, c, g, or t
  misc_feature (1581)..(1581): n is a, c, g, or t
  misc_feature (1584)..(1584): n is a, c, g, or t
  misc_feature (1590)..(1590): n is a, c, g, or t
  misc_feature (1593)..(1593): n is a, c, g, or t
  misc_feature (1596)..(1596): n is a, c, g, or t
  misc_feature (1599)..(1599): n is a, c, g, or t
  misc_feature (1608)..(1608): n is a, c, g, or t
  misc_feature (1611)..(1611): n is a, c, g, or t
  misc_feature (1614)..(1614): n is a, c, g, or t
  misc_feature (1617)..(1617): n is a, c, g, or t
  misc_feature (1620)..(1620): n is a, c, g, or t
  misc_feature (1623)..(1623): n is a, c, g, or t
  misc_feature (1626)..(1626): n is a, c, g, or t
  misc_feature (1629)..(1629): n is a, c, g, or t
  misc_feature (1632)..(1632): n is a, c, g, or t
  misc_feature (1635)..(1635): n is a, c, g, or t
  misc_feature (1644)..(1644): n is a, c, g, or t
  misc_feature (1647)..(1647): n is a, c, g, or t
  misc_feature (1650)..(1650): n is a, c, g, or t
  misc_feature (1653)..(1653): n is a, c, g, or t
  misc_feature (1659)..(1659): n is a, c, g, or t
  misc_feature (1662)..(1662): n is a, c, g, or t
  misc_feature (1665)..(1665): n is a, c, g, or t
  misc_feature (1671)..(1671): n is a, c, g, or t
  misc_feature (1680)..(1680): n is a, c, g, or t
  misc_feature (1686)..(1686): n is a, c, g, or t
  misc_feature (1689)..(1689): n is a, c, g, or t
  misc_feature (1692)..(1692): n is a, c, g, or t
  misc_feature (1695)..(1695): n is a, c, g, or t
  misc_feature (1698)..(1698): n is a, c, g, or t
  misc_feature (1701)..(1701): n is a, c, g, or t
  misc_feature (1704)..(1704): n is a, c, g, or t
  misc_feature (1707)..(1707): n is a, c, g, or t
  misc_feature (1713)..(1713): n is a, c, g, or t
  misc_feature (1716)..(1716): n is a, c, g, or t
  misc_feature (1719)..(1719): n is a, c, g, or t
  misc_feature (1722)..(1722): n is a, c, g, or t
  misc_feature (1725)..(1725): n is a, c, g, or t
  misc_feature (1728)..(1728): n is a, c, g, or t
  misc_feature (1731)..(1731): n is a, c, g, or t
  misc_feature (1737)..(1737): n is a, c, g, or t
  misc_feature (1740)..(1740): n is a, c, g, or t
  misc_feature (1743)..(1743): n is a, c, g, or t
  misc_feature (1746)..(1746): n is a, c, g, or t
  misc_feature (1749)..(1749): n is a, c, g, or t
  misc_feature (1758)..(1758): n is a, c, g, or t
  misc_feature (1761)..(1761): n is a, c, g, or t
  misc_feature (1767)..(1767): n is a, c, g, or t
  misc_feature (1770)..(1770): n is a, c, g, or t
  misc_feature (1773)..(1773): n is a, c, g, or t
  misc_feature (1776)..(1776): n is a, c, g, or t
  misc_feature (1779)..(1779): n is a, c, g, or t
  misc_feature (1782)..(1782): n is a, c, g, or t
  misc_feature (1785)..(1785): n is a, c, g, or t
  misc_feature (1794)..(1794): n is a, c, g, or t
  misc_feature (1797)..(1797): n is a, c, g, or t
  misc_feature (1803)..(1803): n is a, c, g, or t
  misc_feature (1806)..(1806): n is a, c, g, or t
  misc_feature (1809)..(1809): n is a, c, g, or t
  misc_feature (1812)..(1812): n is a, c, g, or t
  misc_feature (1815)..(1815): n is a, c, g, or t
  misc_feature (1821)..(1821): n is a, c, g, or t
  misc_feature (1827)..(1827): n is a, c, g, or t
  misc_feature (1830)..(1830): n is a, c, g, or t
  misc_feature (1836)..(1836): n is a, c, g, or t
  misc_feature (1839)..(1839): n is a, c, g, or t
  misc_feature (1842)..(1842): n is a, c, g, or t
  misc_feature (1845)..(1845): n is a, c, g, or t
  misc_feature (1848)..(1848): n is a, c, g, or t
  misc_feature (1851)..(1851): n is a, c, g, or t
  misc_feature (1854)..(1854): n is a, c, g, or t
  misc_feature (1857)..(1857): n is a, c, g, or t
  misc_feature (1860)..(1860): n is a, c, g, or t
  misc_feature (1863)..(1863): n is a, c, g, or t
  misc_feature (1866)..(1866): n is a, c, g, or t
  misc_feature (1869)..(1869): n is a, c, g, or t
  misc_feature (1872)..(1872): n is a, c, g, or t
  misc_feature (1875)..(1875): n is a, c, g, or t
  misc_feature (1878)..(1878): n is a, c, g, or t
  misc_feature (1881)..(1881): n is a, c, g, or t
  misc_feature (1884)..(1884): n is a, c, g, or t
  misc_feature (1890)..(1890): n is a, c, g, or t
  misc_feature (1893)..(1893): n is a, c, g, or t
  misc_feature (1896)..(1896): n is a, c, g, or t
  misc_feature (1899)..(1899): n is a, c, g, or t
  misc_feature (1902)..(1902): n is a, c, g, or t
  misc_feature (1905)..(1905): n is a, c, g, or t
  misc_feature (1908)..(1908): n is a, c, g, or t
  misc_feature (1911)..(1911): n is a, c, g, or t
  misc_feature (1914)..(1914): n is a, c, g, or t
  misc_feature (1917)..(1917): n is a, c, g, or t
  misc_feature (1920)..(1920): n is a, c, g, or t
  misc_feature (1926)..(1926): n is a, c, g, or t
  misc_feature (1929)..(1929): n is a, c, g, or t
  misc_feature (1932)..(1932): n is a, c, g, or t
  misc_feature (1935)..(1935): n is a, c, g, or t
  misc_feature (1938)..(1938): n is a, c, g, or t
  misc_feature (1941)..(1941): n is a, c, g, or t
  misc_feature (1944)..(1944): n is a, c, g, or t
  misc_feature (1947)..(1947): n is a, c, g, or t
  misc_feature (1950)..(1950): n is a, c, g, or t
  misc_feature (1953)..(1953): n is a, c, g, or t
  misc_feature (1962)..(1962): n is a, c, g, or t
  misc_feature (1971)..(1971): n is a, c, g, or t
  misc_feature (1977)..(1977): n is a, c, g, or t
  misc_feature (1980)..(1980): n is a, c, g, or t
  misc_feature (1986)..(1986): n is a, c, g, or t
  misc_feature (1989)..(1989): n is a, c, g, or t
  misc_feature (1992)..(1992): n is a, c, g, or t
  misc_feature (2001)..(2001): n is a, c, g, or t
  misc_feature (2004)..(2004): n is a, c, g, or t
  misc_feature (2007)..(2007): n is a, c, g, or t
  misc_feature (2013)..(2013): n is a, c, g, or t
  misc_feature (2022)..(2022): n is a, c, g, or t
  misc_feature (2025)..(2025): n is a, c, g, or t
  misc_feature (2031)..(2031): n is a, c, g, or t
  misc_feature (2034)..(2034): n is a, c, g, or t
  misc_feature (2037)..(2037): n is a, c, g, or t
  misc_feature (2040)..(2040): n is a, c, g, or t
  misc_feature (2046)..(2046): n is a, c, g, or t
  misc_feature (2049)..(2049): n is a, c, g, or t
  misc_feature (2055)..(2055): n is a, c, g, or t
  misc_feature (2058)..(2058): n is a, c, g, or t
  misc_feature (2061)..(2061): n is a, c, g, or t
  misc_feature (2064)..(2064): n is a, c, g, or t
  misc_feature (2067)..(2067): n is a, c, g, or t
  misc_feature (2070)..(2070): n is a, c, g, or t
  misc_feature (2073)..(2073): n is a, c, g, or t
  misc_feature (2076)..(2076): n is a, c, g, or t
  misc_feature (2085)..(2085): n is a, c, g, or t
  misc_feature (2088)..(2088): n is a, c, g, or t
  misc_feature (2091)..(2091): n is a, c, g, or t
  misc_feature (2094)..(2094): n is a, c, g, or t
  misc_feature (2100)..(2100): n is a, c, g, or t
  misc_feature (2103)..(2103): n is a, c, g, or t
  misc_feature (2109)..(2109): n is a, c, g, or t
  misc_feature (2112)..(2112): n is a, c, g, or t
  misc_feature (2115)..(2115): n is a, c, g, or t
  misc_feature (2121)..(2121): n is a, c, g, or t
  misc_feature (2130)..(2130): n is a, c, g, or t
  misc_feature (2133)..(2133): n is a, c, g, or t
  misc_feature (2139)..(2139): n is a, c, g, or t
  misc_feature (2142)..(2142): n is a, c, g, or t
  misc_feature (2145)..(2145): n is a, c, g, or t
  misc_feature (2148)..(2148): n is a, c, g, or t
  misc_feature (2154)..(2154): n is a, c, g, or t
  misc_feature (2157)..(2157): n is a, c, g, or t
  misc_feature (2160)..(2160): n is a, c, g, or t
  misc_feature (2163)..(2163): n is a, c, g, or t
  misc_feature (2166)..(2166): n is a, c, g, or t
  misc_feature (2169)..(2169): n is a, c, g, or t
  misc_feature (2172)..(2172): n is a, c, g, or t
  misc_feature (2175)..(2175): n is a, c, g, or t
  misc_feature (2178)..(2178): n is a, c, g, or t
  misc_feature (2181)..(2181): n is a, c, g, or t
  misc_feature (2184)..(2184): n is a, c, g, or t
  misc_feature (2187)..(2187): n is a, c, g, or t
  misc_feature (2190)..(2190): n is a, c, g, or t
  misc_feature (2193)..(2193): n is a, c, g, or t
  misc_feature (2202)..(2202): n is a, c, g, or t
  misc_feature (2211)..(2211): n is a, c, g, or t
  misc_feature (2217)..(2217): n is a, c, g, or t
  misc_feature (2220)..(2220): n is a, c, g, or t
  misc_feature (2223)..(2223): n is a, c, g, or t
  misc_feature (2226)..(2226): n is a, c, g, or t
  misc_feature (2229)..(2229): n is a, c, g, or t
  misc_feature (2232)..(2232): n is a, c, g, or t
  misc_feature (2235)..(2235): n is a, c, g, or t
  misc_feature (2238)..(2238): n is a, c, g, or t
  misc_feature (2244)..(2244): n is a, c, g, or t
  misc_feature (2247)..(2247): n is a, c, g, or t
  misc_feature (2250)..(2250): n is a, c, g, or t
  misc_feature (2256)..(2256): n is a, c, g, or t
  misc_feature (2265)..(2265): n is a, c, g, or t
  misc_feature (2271)..(2271): n is a, c, g, or t
  misc_feature (2274)..(2274): n is a, c, g, or t
  misc_feature (2277)..(2277): n is a, c, g, or t
  misc_feature (2280)..(2280): n is a, c, g, or t
  misc_feature (2283)..(2283): n is a, c, g, or t
  misc_feature (2289)..(2289): n is a, c, g, or t
  misc_feature (2292)..(2292): n is a, c, g, or t
  misc_feature (2295)..(2295): n is a, c, g, or t
  misc_feature (2307)..(2307): n is a, c, g, or t
  misc_feature (2316)..(2316): n is a, c, g, or t
  misc_feature (2319)..(2319): n is a, c, g, or t
  misc_feature (2328)..(2328): n is a, c, g, or t
  misc_feature (2337)..(2337): n is a, c, g, or t
  misc_feature (2346)..(2346): n is a, c, g, or t
  misc_feature (2355)..(2355): n is a, c, g, or t
  misc_feature (2364)..(2364): n is a, c, g, or t
  misc_feature (2367)..(2367): n is a, c, g, or t
  misc_feature (2373)..(2373): n is a, c, g, or t
  misc_feature (2382)..(2382): n is a, c, g, or t
  misc_feature (2385)..(2385): n is a, c, g, or t
  misc_feature (2388)..(2388): n is a, c, g, or t
  misc_feature (2391)..(2391): n is a, c, g, or t
  misc_feature (2397)..(2397): n is a, c, g, or t
  misc_feature (2400)..(2400): n is a, c, g, or t
  misc_feature (2403)..(2403): n is a, c, g, or t
  misc_feature (2406)..(2406): n is a, c, g, or t
  misc_feature (2409)..(2409): n is a, c, g, or t
  misc_feature (2412)..(2412): n is a, c, g, or t
  misc_feature (2415)..(2415): n is a, c, g, or t
  misc_feature (2418)..(2418): n is a, c, g, or t
  misc_feature (2427)..(2427): n is a, c, g, or t
  misc_feature (2433)..(2433): n is a, c, g, or t
  misc_feature (2436)..(2436): n is a, c, g, or t
  misc_feature (2442)..(2442): n is a, c, g, or t
  misc_feature (2445)..(2445): n is a, c, g, or t
  misc_feature (2451)..(2451): n is a, c, g, or t
  misc_feature (2454)..(2454): n is a, c, g, or t
  misc_feature (2457)..(2457): n is a, c, g, or t
  misc_feature (2463)..(2463): n is a, c, g, or t
  misc_feature (2469)..(2469): n is a, c, g, or t
  misc_feature (2472)..(2472): n is a, c, g, or t
  misc_feature (2478)..(2478): n is a, c, g, or t
  misc_feature (2481)..(2481): n is a, c, g, or t
  misc_feature (2484)..(2484): n is a, c, g, or t
  misc_feature (2487)..(2487): n is a, c, g, or t
  misc_feature (2490)..(2490): n is a, c, g, or t
  misc_feature (2493)..(2493): n is a, c, g, or t
  misc_feature (2496)..(2496): n is a, c, g, or t
  misc_feature (2499)..(2499): n is a, c, g, or t
  misc_feature (2502)..(2502): n is a, c, g, or t
  misc_feature (2505)..(2505): n is a, c, g, or t
  misc_feature (2508)..(2508): n is a, c, g, or t
  misc_feature (2511)..(2511): n is a, c, g, or t
  misc_feature (2517)..(2517): n is a, c, g, or t
  misc_feature (2520)..(2520): n is a, c, g, or t
  misc_feature (2523)..(2523): n is a, c, g, or t
  misc_feature (2526)..(2526): n is a, c, g, or t
  misc_feature (2529)..(2529): n is a, c, g, or t
  misc_feature (2535)..(2535): n is a, c, g, or t
  misc_feature (2538)..(2538): n is a, c, g, or t
  misc_feature (2541)..(2541): n is a, c, g, or t
  misc_feature (2544)..(2544): n is a, c, g, or t
  misc_feature (2547)..(2547): n is a, c, g, or t
  misc_feature (2550)..(2550): n is a, c, g, or t
  misc_feature (2553)..(2553): n is a, c, g, or t
  misc_feature (2562)..(2562): n is a, c, g, or t
  misc_feature (2565)..(2565): n is a, c, g, or t
  misc_feature (2568)..(2568): n is a, c, g, or t
  misc_feature (2571)..(2571): n is a, c, g, or t
  misc_feature (2577)..(2577): n is a, c, g, or t
  misc_feature (2580)..(2580): n is a, c, g, or t
  misc_feature (2583)..(2583): n is a, c, g, or t
  misc_feature (2589)..(2589): n is a, c, g, or t
  misc_feature (2592)..(2592): n is a, c, g, or t
  misc_feature (2595)..(2595): n is a, c, g, or t
  misc_feature (2598)..(2598): n is a, c, g, or t
  misc_feature (2601)..(2601): n is a, c, g, or t
  misc_feature (2604)..(2604): n is a, c, g, or t
  misc_feature (2607)..(2607): n is a, c, g, or t
  misc_feature (2616)..(2616): n is a, c, g, or t
  misc_feature (2619)..(2619): n is a, c, g, or t
  misc_feature (2625)..(2625): n is a, c, g, or t
  misc_feature (2634)..(2634): n is a, c, g, or t
  misc_feature (2640)..(2640): n is a, c, g, or t
  misc_feature (2643)..(2643): n is a, c, g, or t
  misc_feature (2646)..(2646): n is a, c, g, or t
  misc_feature (2649)..(2649): n is a, c, g, or t
  misc_feature (2652)..(2652): n is a, c, g, or t
  misc_feature (2658)..(2658): n is a, c, g, or t
  misc_feature (2664)..(2664): n is a, c, g, or t
  misc_feature (2667)..(2667): n is a, c, g, or t
  misc_feature (2670)..(2670): n is a, c, g, or t
  misc_feature (2673)..(2673): n is a, c, g, or t
  misc_feature (2676)..(2676): n is a, c, g, or t
  misc_feature (2685)..(2685): n is a, c, g, or t
  misc_feature (2694)..(2694): n is a, c, g, or t
  misc_feature (2700)..(2700): n is a, c, g, or t
  misc_feature (2703)..(2703): n is a, c, g, or t
  misc_feature (2709)..(2709): n is a, c, g, or t
  misc_feature (2712)..(2712): n is a, c, g, or t
  misc_feature (2715)..(2715): n is a, c, g, or t
  misc_feature (2718)..(2718): n is a, c, g, or t
  misc_feature (2721)..(2721): n is a, c, g, or t
  misc_feature (2730)..(2730): n is a, c, g, or t
  misc_feature (2739)..(2739): n is a, c, g, or t
  misc_feature (2742)..(2742): n is a, c, g, or t
  misc_feature (2748)..(2748): n is a, c, g, or t
  misc_feature (2754)..(2754): n is a, c, g, or t
  misc_feature (2757)..(2757): n is a, c, g, or t
  misc_feature (2763)..(2763): n is a, c, g, or t
  misc_feature (2766)..(2766): n is a, c, g, or t
  misc_feature (2769)..(2769): n is a, c, g, or t
  misc_feature (2772)..(2772): n is a, c, g, or t
  misc_feature (2775)..(2775): n is a, c, g, or t
  misc_feature (2778)..(2778): n is a, c, g, or t
  misc_feature (2784)..(2784): n is a, c, g, or t
  misc_feature (2787)..(2787): n is a, c, g, or t
  misc_feature (2790)..(2790): n is a, c, g, or t
  misc_feature (2793)..(2793): n is a, c, g, or t
  misc_feature (2796)..(2796): n is a, c, g, or t
  misc_feature (2799)..(2799): n is a, c, g, or t
  misc_feature (2802)..(2802): n is a, c, g, or t
  misc_feature (2808)..(2808): n is a, c, g, or t
  misc_feature (2811)..(2811): n is a, c, g, or t
  misc_feature (2814)..(2814): n is a, c, g, or t
  misc_feature (2817)..(2817): n is a, c, g, or t
  misc_feature (2820)..(2820): n is a, c, g, or t
  misc_feature (2823)..(2823): n is a, c, g, or t
  misc_feature (2826)..(2826): n is a, c, g, or t
  misc_feature (2829)..(2829): n is a, c, g, or t
  misc_feature (2838)..(2838): n is a, c, g, or t
  misc_feature (2847)..(2847): n is a, c, g, or t
  misc_feature (2850)..(2850): n is a, c, g, or t
  misc_feature (2853)..(2853): n is a, c, g, or t
  misc_feature (2856)..(2856): n is a, c, g, or t
  misc_feature (2859)..(2859): n is a, c, g, or t
  misc_feature (2865)..(2865): n is a, c, g, or t
  misc_feature (2871)..(2871): n is a, c, g, or t
  misc_feature (2874)..(2874): n is a, c, g, or t
  misc_feature (2877)..(2877): n is a, c, g, or t
  misc_feature (2883)..(2883): n is a, c, g, or t
  misc_feature (2889)..(2889): n is a, c, g, or t
  misc_feature (2892)..(2892): n is a, c, g, or t
  misc_feature (2895)..(2895): n is a, c, g, or t
  misc_feature (2898)..(2898): n is a, c, g, or t
  misc_feature (2901)..(2901): n is a, c, g, or t
  misc_feature (2904)..(2904): n is a, c, g, or t
  misc_feature (2907)..(2907): n is a, c, g, or t
  misc_feature (2910)..(2910): n is a, c, g, or t
  misc_feature (2913)..(2913): n is a, c, g, or t
  misc_feature (2916)..(2916): n is a, c, g, or t
  misc_feature (2919)..(2919): n is a, c, g, or t
  misc_feature (2922)..(2922): n is a, c, g, or t
  misc_feature (2925)..(2925): n is a, c, g, or t
  misc_feature (2928)..(2928): n is a, c, g, or t
  misc_feature (2937)..(2937): n is a, c, g, or t
  misc_feature (2943)..(2943): n is a, c, g, or t
  misc_feature (2946)..(2946): n is a, c, g, or t
  misc_feature (2949)..(2949): n is a, c, g, or t
  misc_feature (2955)..(2955): n is a, c, g, or t
  misc_feature (2961)..(2961): n is a, c, g, or t
  misc_feature (2964)..(2964): n is a, c, g, or t
  misc_feature (2967)..(2967): n is a, c, g, or t
  misc_feature (2970)..(2970): n is a, c, g, or t
  misc_feature (2973)..(2973): n is a, c, g, or t
  misc_feature (2982)..(2982): n is a, c, g, or t
  misc_feature (2988)..(2988): n is a, c, g, or t
  misc_feature (2991)..(2991): n is a, c, g, or t
  misc_feature (2994)..(2994): n is a, c, g, or t
  misc_feature (2997)..(2997): n is a, c, g, or t
  misc_feature (3000)..(3000): n is a, c, g, or t
  misc_feature (3003)..(3003): n is a, c, g, or t
  misc_feature (3006)..(3006): n is a, c, g, or t
  misc_feature (3012)..(3012): n is a, c, g, or t
  misc_feature (3015)..(3015): n is a, c, g, or t
  misc_feature (3021)..(3021): n is a, c, g, or t
  misc_feature (3024)..(3024): n is a, c, g, or t
  misc_feature (3027)..(3027): n is a, c, g, or t
  misc_feature (3033)..(3033): n is a, c, g, or t
  misc_feature (3042)..(3042): n is a, c, g, or t
  misc_feature (3045)..(3045): n is a, c, g, or t
  misc_feature (3051)..(3051): n is a, c, g, or t
  misc_feature (3057)..(3057): n is a, c, g, or t
  misc_feature (3060)..(3060): n is a, c, g, or t
  misc_feature (3066)..(3066): n is a, c, g, or t
  misc_feature (3069)..(3069): n is a, c, g, or t
  misc_feature (3072)..(3072): n is a, c, g, or t
  misc_feature (3075)..(3075): n is a, c, g, or t
  misc_feature (3078)..(3078): n is a, c, g, or t
  misc_feature (3081)..(3081): n is a, c, g, or t
  misc_feature (3084)..(3084): n is a, c, g, or t
  misc_feature (3087)..(3087): n is a, c, g, or t
  misc_feature (3093)..(3093): n is a, c, g, or t
  misc_feature (3096)..(3096): n is a, c, g, or t
  misc_feature (3099)..(3099): n is a, c, g, or t
  misc_feature (3105)..(3105): n is a, c, g, or t
  misc_feature (3114)..(3114): n is a, c, g, or t
  misc_feature (3123)..(3123): n is a, c, g, or t
  misc_feature (3126)..(3126): n is a, c, g, or t
  misc_feature (3129)..(3129): n is a, c, g, or t
  misc_feature (3132)..(3132): n is a, c, g, or t
  misc_feature (3135)..(3135): n is a, c, g, or t
  misc_feature (3141)..(3141): n is a, c, g, or t
  misc_feature (3147)..(3147): n is a, c, g, or t
  misc_feature (3150)..(3150): n is a, c, g, or t
  misc_feature (3153)..(3153): n is a, c, g, or t
  misc_feature (3156)..(3156): n is a, c, g, or t
  misc_feature (3159)..(3159): n is a, c, g, or t
  misc_feature (3162)..(3162): n is a, c, g, or t
  misc_feature (3165)..(3165): n is a, c, g, or t
  misc_feature (3168)..(3168): n is a, c, g, or t
  misc_feature (3174)..(3174): n is a, c, g, or t
  misc_feature (3177)..(3177): n is a, c, g, or t
  misc_feature (3183)..(3183): n is a, c, g, or t
  misc_feature (3186)..(3186): n is a, c, g, or t
  misc_feature (3192)..(3192): n is a, c, g, or t
  misc_feature (3198)..(3198): n is a, c, g, or t
  misc_feature (3201)..(3201): n is a, c, g, or t
  misc_feature (3204)..(3204): n is a, c, g, or t
  misc_feature (3210)..(3210): n is a, c, g, or t
  misc_feature (3216)..(3216): n is a, c, g, or t
  misc_feature (3219)..(3219): n is a, c, g, or t
  misc_feature (3222)..(3222): n is a, c, g, or t
  misc_feature (3225)..(3225): n is a, c, g, or t
  misc_feature (3228)..(3228): n is a, c, g, or t
  misc_feature (3231)..(3231): n is a, c, g, or t
  misc_feature (3234)..(3234): n is a, c, g, or t
  misc_feature (3237)..(3237): n is a, c, g, or t
  misc_feature (3240)..(3240): n is a, c, g, or t
  misc_feature (3246)..(3246): n is a, c, g, or t
  misc_feature (3249)..(3249): n is a, c, g, or t
  misc_feature (3252)..(3252): n is a, c, g, or t
  misc_feature (3255)..(3255): n is a, c, g, or t
  misc_feature (3258)..(3258): n is a, c, g, or t
  misc_feature (3261)..(3261): n is a, c, g, or t
  misc_feature (3264)..(3264): n is a, c, g, or t
  misc_feature (3273)..(3273): n is a, c, g, or t
  misc_feature (3276)..(3276): n is a, c, g, or t
  misc_feature (3282)..(3282): n is a, c, g, or t
  misc_feature (3291)..(3291): n is a, c, g, or t
  misc_feature (3297)..(3297): n is a, c, g, or t
  misc_feature (3300)..(3300): n is a, c, g, or t
  misc_feature (3306)..(3306): n is a, c, g, or t
  misc_feature (3309)..(3309): n is a, c, g, or t
  misc_feature (3312)..(3312): n is a, c, g, or t
  misc_feature (3315)..(3315): n is a, c, g, or t
  misc_feature (3318)..(3318): n is a, c, g, or t
  misc_feature (3321)..(3321): n is a, c, g, or t
  misc_feature (3324)..(3324): n is a, c, g, or t
  misc_feature (3327)..(3327): n is a, c, g, or t
  misc_feature (3330)..(3330): n is a, c, g, or t
  misc_feature (3336)..(3336): n is a, c, g, or t
  misc_feature (3342)..(3342): n is a, c, g, or t
  misc_feature (3345)..(3345): n is a, c, g, or t
  misc_feature (3354)..(3354): n is a, c, g, or t
  misc_feature (3360)..(3360): n is a, c, g, or t
  misc_feature (3363)..(3363): n is a, c, g, or t
  misc_feature (3369)..(3369): n is a, c, g, or t
  misc_feature (3372)..(3372): n is a, c, g, or t
  misc_feature (3375)..(3375): n is a, c, g, or t
  misc_feature (3378)..(3378): n is a, c, g, or t
  misc_feature (3381)..(3381): n is a, c, g, or t
  misc_feature (3387)..(3387): n is a, c, g, or t
  misc_feature (3390)..(3390): n is a, c, g, or t
  misc_feature (3393)..(3393): n is a, c, g, or t
  misc_feature (3399)..(3399): n is a, c, g, or t
  misc_feature (3408)..(3408): n is a, c, g, or t
  misc_feature (3411)..(3411): n is a, c, g, or t
  misc_feature (3414)..(3414): n is a, c, g, or t
  misc_feature (3417)..(3417): n is a, c, g, or t
  misc_feature (3420)..(3420): n is a, c, g, or t
  misc_feature (3423)..(3423): n is a, c, g, or t
  misc_feature (3426)..(3426): n is a, c, g, or t
  misc_feature (3435)..(3435): n is a, c, g, or t
  misc_feature (3438)..(3438): n is a, c, g, or t
  misc_feature (3444)..(3444): n is a, c, g, or t
  misc_feature (3447)..(3447): n is a, c, g, or t
  misc_feature (3450)..(3450): n is a, c, g, or t
  misc_feature (3453)..(3453): n is a, c, g, or t
  misc_feature (3456)..(3456): n is a, c, g, or t
  misc_feature (3462)..(3462): n is a, c, g, or t
  misc_feature (3471)..(3471): n is a, c, g, or t
  misc_feature (3480)..(3480): n is a, c, g, or t
  misc_feature (3489)..(3489): n is a, c, g, or t
  misc_feature (3492)..(3492): n is a, c, g, or t
  misc_feature (3495)..(3495): n is a, c, g, or t
  misc_feature (3498)..(3498): n is a, c, g, or t
  misc_feature (3501)..(3501): n is a, c, g, or t
  misc_feature (3507)..(3507): n is a, c, g, or t
  misc_feature (3510)..(3510): n is a, c, g, or t
  misc_feature (3513)..(3513): n is a, c, g, or t
  misc_feature (3516)..(3516): n is a, c, g, or t
  misc_feature (3519)..(3519): n is a, c, g, or t
  misc_feature (3522)..(3522): n is a, c, g, or t
  misc_feature (3525)..(3525): n is a, c, g, or t
  misc_feature (3528)..(3528): n is a, c, g, or t
  misc_feature (3531)..(3531): n is a, c, g, or t
  misc_feature (3534)..(3534): n is a, c, g, or t
  misc_feature (3537)..(3537): n is a, c, g, or t
  misc_feature (3555)..(3555): n is a, c, g, or t
  misc_feature (3561)..(3561): n is a, c, g, or t
  misc_feature (3564)..(3564): n is a, c, g, or t
  misc_feature (3567)..(3567): n is a, c, g, or t
  misc_feature (3570)..(3570): n is a, c, g, or t
  misc_feature (3573)..(3573): n is a, c, g, or t
  misc_feature (3576)..(3576): n is a, c, g, or t
  misc_feature (3582)..(3582): n is a, c, g, or t
  misc_feature (3585)..(3585): n is a, c, g, or t
  misc_feature (3588)..(3588): n is a, c, g, or t
  misc_feature (3591)..(3591): n is a, c, g, or t
  misc_feature (3594)..(3594): n is a, c, g, or t
  misc_feature (3600)..(3600): n is a, c, g, or t
  misc_feature (3603)..(3603): n is a, c, g, or t
  misc_feature (3609)..(3609): n is a, c, g, or t
  misc_feature (3612)..(3612): n is a, c, g, or t
  misc_feature (3615)..(3615): n is a, c, g, or t
  misc_feature (3618)..(3618): n is a, c, g, or t
  misc_feature (3621)..(3621): n is a, c, g, or t
  misc_feature (3627)..(3627): n is a, c, g, or t
  misc_feature (3636)..(3636): n is a, c, g, or t
  misc_feature (3639)..(3639): n is a, c, g, or t
  misc_feature (3642)..(3642): n is a, c, g, or t
  misc_feature (3645)..(3645): n is a, c, g, or t
  misc_feature (3648)..(3648): n is a, c, g, or t
  misc_feature (3651)..(3651): n is a, c, g, or t
  misc_feature (3654)..(3654): n is a, c, g, or t
  misc_feature (3660)..(3660): n is a, c, g, or t
  misc_feature (3663)..(3663): n is a, c, g, or t
  misc_feature (3666)..(3666): n is a, c, g, or t
  misc_feature (3669)..(3669): n is a, c, g, or t
  misc_feature (3672)..(3672): n is a, c, g, or t
  misc_feature (3678)..(3678): n is a, c, g, or t
  misc_feature (3681)..(3681): n is a, c, g, or t
  misc_feature (3690)..(3690): n is a, c, g, or t
  misc_feature (3693)..(3693): n is a, c, g, or t
  misc_feature (3696)..(3696): n is a, c, g, or t
  misc_feature (3699)..(3699): n is a, c, g, or t
  misc_feature (3708)..(3708): n is a, c, g, or t
  misc_feature (3717)..(3717): n is a, c, g, or t
  misc_feature (3720)..(3720): n is a, c, g, or t
  misc_feature (3723)..(3723): n is a, c, g, or t
  misc_feature (3726)..(3726): n is a, c, g, or t
  misc_feature (3729)..(3729): n is a, c, g, or t
  misc_feature (3732)..(3732): n is a, c, g, or t
  misc_feature (3735)..(3735): n is a, c, g, or t
  misc_feature (3738)..(3738): n is a, c, g, or t
  misc_feature (3741)..(3741): n is a, c, g, or t
  misc_feature (3744)..(3744): n is a, c, g, or t
  misc_feature (3750)..(3750): n is a, c, g, or t
  misc_feature (3753)..(3753): n is a, c, g, or t
  misc_feature (3756)..(3756): n is a, c, g, or t
  misc_feature (3759)..(3759): n is a, c, g, or t
  misc_feature (3762)..(3762): n is a, c, g, or t
  misc_feature (3765)..(3765): n is a, c, g, or t
  misc_feature (3771)..(3771): n is a, c, g, or t
  misc_feature (3774)..(3774): n is a, c, g, or t
  misc_feature (3777)..(3777): n is a, c, g, or t
  misc_feature (3780)..(3780): n is a, c, g, or t
  misc_feature (3783)..(3783): n is a, c, g, or t
  misc_feature (3789)..(3789): n is a, c, g, or t
  misc_feature (3792)..(3792): n is a, c, g, or t
  misc_feature (3795)..(3795): n is a, c, g, or t
  misc_feature (3798)..(3798): n is a, c, g, or t
  misc_feature (3801)..(3801): n is a, c, g, or t
  misc_feature (3804)..(3804): n is a, c, g, or t
ggngarmgnggnttyccnggnathccnggnacnccnggnccnccnggnytnccnggnytncarggnccngtnggnccnccnggnttyacnggnccnccnggnccnccnggnccnccnggnccnccnggngaraarggncaratgggnytnwsnttycarggnccnaarggngayaarggngaycarggngtnwsnggnccnccnggngtnccnggncargcncargtncargaraarggngayttygcnacnaarggngaraarggncaraarggngarccnggnttycarggnatgccnggngtnggngaraarggngarccnggnaarccnggnccnmgnggnaarccnggnaargayggngayaarggngaraarggnwsnccnggnttyccnggngarccnggntayccnggnytnathggnmgncarggnccncarggngaraarggngargcnggnccnccnggnccnccnggnathgtnathggnacnggnccnytnggngaraarggngarmgnggntayccnggnacnccnggnccnmgnggngarccnggnccnaarggnttyccnggnytnccnggncarccnggnccnccnggnytnccngtnccnggncargcnggngcnccnggnttyccnggngarmgnggngaraarggngaymgnggnttyccnggnacnwsnytnccnggnccnwsnggnmgngayggnytnccnggnccnccnggnwsnccnggnccnccnggncarccnggntayacnaayggnathgtngartgycarccnggnccnccnggngaycarggnccnccnggnathccnggncarccnggnttyathggngarathggngaraarggncaraarggngarwsntgyytnathtgygayathgayggntaymgnggnccnccnggnccncarggnccnccnggngarathggnttyccnggncarccnggngcnaarggngaymgnggnytnccnggnmgngayggngtngcnggngtnccnggnccncarggnacnccnggnytnathggncarccnggngcnaarggngarccnggngarttytayttygayytnmgnytnaarggngayaarggngayccnggnttyccnggncarccnggnatgacnggnmgngcnggnwsnccnggnmgngayggncayccnggnytnccnggnccnaarggnwsnccnggnwsngtnggnytnaarggngarmgnggnccnccnggnggngtnggnttyccnggnwsnmgnggngayacnggnccnccnggnccnccnggntayggnccngcnggnccnathggngayaarggncargcnggnttyccnggnggnccnggnwsnccnggnytnccnggnccnaarggngarccnggnaarathgtnccnytnccnggnccnccnggngcngarggnytnccnggnwsnccnggnttyccnggnccncarggngaymgnggnttyccnggnacnccnggnmgnccnggnytnccnggngaraarggngcngtnggncarccnggnathggnttyccnggnccnccnggnccnaarggngtngayggnytnccnggngayatgggnccnccnggnacnccnggnmgnccnggnttyaayggnytnccnggnaayccnggngtncarggncaraarggngarccnggngtnggnytnccnggnytnaarggnytnccnggnytnccnggnathccnggnacnccnggngaraarggnwsnathggngtnccnggngtnccnggngarcayggngcnathggnccnccnggnytncarggnathmgnggngarccnggnccnccnggnytnccnggnwsngtnggnwsnccnggngtnccnggnathggnccnccnggngcnmgnggnccnccnggnggncarggnccnccnggnytnwsnggnccnccnggnathaarggngaraarggnttyccnggnttyccnggnytngayatgccnggnccnaarggngayaarggngcncarggnytnccnggnathacnggncarwsnggnytnccnggnytnccnggncarcarggngcnccnggnathccnggnttyccnggnwsnaarggngaratgggngtnatgggnacnccnggncarccnggnwsnccnggnccngtnggngcnccnggnytnccnggngaraarggngaycayggnttyccnggnwsnwsnggnccnmgnggngayccnggnytnaarggngayaarggngaygtnggnytnccnggnaarccnggnwsnatggayaargtngayatgggnwsnatgaarggncaraarggngaycarggngaraarggncarathggnccnathggngaraarggnwsnmgnggngayccnggnacnccnggngtnccnggnaargayggncargcnggncarccnggncarccnggnccnaarggngayccnggnathwsnggnacnccnggngcnccnggnytnccnggnccnaarggnwsngtnggnggnatgggnytnccnggnacnccnggngaraarggngtnccnggnathccnggnccncarggnwsnccnggnytnccnggngayaarggngcnaarggngaraarggncargcnggnccnccnggnathggnathccnggnytnmgnggngaraarggngaycarggnathgcnggnttyccnggnwsnccnggngaraarggngaraarggnwsnathggnathccnggnatgccnggnwsnccnggnytnaarggnwsnccnggnwsngtnggntayccnggnwsnccnggnytnccnggngaraarggngayaarggnytnccnggnytngayggnathccnggngtnaarggngargcnggnytnccnggnacnccnggnccnacnggnccngcnggncaraarggngarccnggnwsngayggnathccnggnwsngcnggngaraarggngarccnggnytnccnggnmgnggnttyccnggnttyccnggngcnaarggngayaarggnwsnaarggngargtnggnttyccnggnytngcnggnwsnccnggnathccnggnwsnaarggngarcarggnttyatgggnccnccnggnccncarggncarccnggnytnccnggnwsnccnggncaygcnacngarggnccnaarggngaymgnggnccncarggncarccnggnytnccnggnytnccnggnccnatgggnccnccnggnytnccnggnathgayggngtnaarggngayaarggnaayccnggntggccnggngcnccnggngtnccnggnccnaarggngayccnggnttycarggnatgccnggnathggnggnwsnccnggnathacnggnwsnaarggngayatgggnccnccnggngtnccnggnttycarggnccnaarggnytnccnggnytncarggnathaarggngaycarggngaycarggngtnccnggngcnaarggnytnccnggnccnccnggnccnccnggnccntaygayathathaarggngarccnggnytnccnggnccngarggnccnccnggnytnaarggnytncarggnytnccnggnccnaarggncarcarggngtnacnggnytngtnggnathccnggnccnccnggnathccnggnttygayggngcnccnggncaraarggngaratgggnccngcnggnccnacnggnccnmgnggnttyccnggnccnccnggnccngayggnytnccnggnwsnatgggnccnccnggnacnccn

SEQ ID NO: 1101 - DNA, 3903 bp, Artificial Sequence
  hCol-CNA06 (alpha2(IV) THD)
  misc_feature (3)..(3): n is a, c, g, or t
  misc_feature (9)..(9): n is a, c, g, or t
  misc_feature (12)..(12): n is a, c, g, or t
  misc_feature (18)..(18): n is a, c, g, or t
  misc_feature (21)..(21): n is a, c, g, or t
  misc_feature (24)..(24): n is a, c, g, or t
  misc_feature (27)..(27): n is a, c, g, or t
  misc_feature (30)..(30): n is a, c, g, or t
  misc_feature (39)..(39): n is a, c, g, or t
  misc_feature (42)..(42): n is a, c, g, or t
  misc_feature (45)..(45): n is a, c, g, or t
  misc_feature (48)..(48): n is a, c, g, or t
  misc_feature (51)..(51): n is a, c, g, or t
  misc_feature (54)..(54): n is a, c, g, or t
  misc_feature (57)..(57): n is a, c, g, or t
  misc_feature (63)..(63): n is a, c, g, or t
  misc_feature (66)..(66): n is a, c, g, or t
  misc_feature (75)..(75): n is a, c, g, or t
  misc_feature (78)..(78): n is a, c, g, or t
  misc_feature (81)..(81): n is a, c, g, or t
  misc_feature (84)..(84): n is a, c, g, or t
  misc_feature (87)..(87): n is a, c, g, or t
  misc_feature (90)..(90): n is a, c, g, or t
  misc_feature (93)..(93): n is a, c, g, or t
  misc_feature (96)..(96): n is a, c, g, or t
  misc_feature (99)..(99): n is a, c, g, or t
  misc_feature (102)..(102): n is a, c, g, or t
  misc_feature (105)..(105): n is a, c, g, or t
  misc_feature (108)..(108): n is a, c, g, or t
  misc_feature (111)..(111): n is a, c, g, or t
  misc_feature (114)..(114): n is a, c, g, or t
  misc_feature (117)..(117): n is a, c, g, or t
  misc_feature (120)..(120): n is a, c, g, or t
  misc_feature (123)..(123): n is a, c, g, or t
  misc_feature (129)..(129): n is a, c, g, or t
  misc_feature (138)..(138): n is a, c, g, or t
  misc_feature (144)..(144): n is a, c, g, or t
  misc_feature (147)..(147): n is a, c, g, or t
  misc_feature (150)..(150): n is a, c, g, or t
  misc_feature (153)..(153): n is a, c, g, or t
  misc_feature (162)..(162): n is a, c, g, or t
  misc_feature (165)..(165): n is a, c, g, or t
  misc_feature (171)..(171): n is a, c, g, or t
  misc_feature (180)..(180): n is a, c, g, or t
  misc_feature (186)..(186): n is a, c, g, or t
  misc_feature (189)..(189): n is a, c, g, or t
  misc_feature (195)..(195): n is a, c, g, or t
  misc_feature (198)..(198): n is a, c, g, or t
  misc_feature (201)..(201): n is a, c, g, or t
  misc_feature (207)..(207): n is a, c, g, or t
  misc_feature (213)..(213): n is a, c, g, or t
  misc_feature (216)..(216): n is a, c, g, or t
  misc_feature (222)..(222): n is a, c, g, or t
  misc_feature (225)..(225): n is a, c, g, or t
  misc_feature (231)..(231): n is a, c, g, or t
  misc_feature (240)..(240): n is a, c, g, or t
  misc_feature (243)..(243): n is a, c, g, or t
  misc_feature (246)..(246): n is a, c, g, or t
  misc_feature (249)..(249): n is a, c, g, or t
  misc_feature (252)..(252): n is a, c, g, or t
  misc_feature (255)..(255): n is a, c, g, or t
  misc_feature (264)..(264): n is a, c, g, or t
  misc_feature (279)..(279): n is a, c, g, or t
  misc_feature (288)..(288): n is a, c, g, or t
  misc_feature (291)..(291): n is a, c, g, or t
  misc_feature (297)..(297): n is a, c, g, or t
  misc_feature (303)..(303): n is a, c, g, or t
  misc_feature (306)..(306): n is a, c, g, or t
  misc_feature (312)..(312): n is a, c, g, or t
  misc_feature (315)..(315): n is a, c, g, or t
  misc_feature (321)..(321): n is a, c, g, or t
  misc_feature (324)..(324): n is a, c, g, or t
  misc_feature (330)..(330): n is a, c, g, or t
  misc_feature (339)..(339): n is a, c, g, or t
  misc_feature (348)..(348): n is a, c, g, or t
  misc_feature (354)..(354): n is a, c, g, or t
  misc_feature (357)..(357): n is a, c, g, or t
  misc_feature (360)..(360): n is a, c, g, or t
  misc_feature (363)..(363): n is a, c, g, or t
  misc_feature (366)..(366): n is a, c, g, or t
  misc_feature (372)..(372): n is a, c, g, or t
  misc_feature (375)..(375): n is a, c, g, or t
  misc_feature (378)..(378): n is a, c, g, or t
  misc_feature (381)..(381): n is a, c, g, or t
  misc_feature (384)..(384): n is a, c, g, or t
  misc_feature (393)..(393): n is a, c, g, or t
  misc_feature (396)..(396): n is a, c, g, or t
  misc_feature (399)..(399): n is a, c, g, or t
  misc_feature (402)..(402): n is a, c, g, or t
  misc_feature (411)..(411): n is a, c, g, or t
  misc_feature (414)..(414): n is a, c, g, or t
  misc_feature (417)..(417): n is a, c, g, or t
  misc_feature (420)..(420): n is a, c, g, or t
  misc_feature (423)..(423): n is a, c, g, or t
  misc_feature (429)..(429): n is a, c, g, or t
  misc_feature (438)..(438): n is a, c, g, or t
  misc_feature (441)..(441): n is a, c, g, or t
  misc_feature (447)..(447): n is a, c, g, or t
  misc_feature (450)..(450): n is a, c, g, or t
  misc_feature (453)..(453): n is a, c, g, or t
  misc_feature (456)..(456): n is a, c, g, or t
  misc_feature (459)..(459): n is a, c, g, or t
  misc_feature (465)..(465): n is a, c, g, or t
  misc_feature (471)..(471): n is a, c, g, or t
  misc_feature (474)..(474): n is a, c, g, or t
  misc_feature (480)..(480): n is a, c, g, or t
  misc_feature (483)..(483): n is a, c, g, or t
  misc_feature (486)..(486): n is a, c, g, or t
  misc_feature (489)..(489): n is a, c, g, or t
  misc_feature (492)..(492): n is a, c, g, or t
  misc_feature (495)..(495): n is a, c, g, or t
  misc_feature (498)..(498): n is a, c, g, or t
  misc_feature (501)..(501): n is a, c, g, or t
  misc_feature (507)..(507): n is a, c, g, or t
  misc_feature (510)..(510): n is a, c, g, or t
  misc_feature (516)..(516): n is a, c, g, or t
  misc_feature (519)..(519): n is a, c, g, or t
  misc_feature (522)..(522): n is a, c, g, or t
  misc_feature (525)..(525): n is a, c, g, or t
  misc_feature (531)..(531): n is a, c, g, or t
  misc_feature (534)..(534): n is a, c, g, or t
  misc_feature (537)..(537): n is a, c, g, or t
  misc_feature (540)..(540): n is a, c, g, or t
  misc_feature (546)..(546): n is a, c, g, or t
  misc_feature (549)..(549): n is a, c, g, or t
  misc_feature (555)..(555): n is a, c, g, or t
  misc_feature (558)..(558): n is a, c, g, or t
  misc_feature (561)..(561): n is a, c, g, or t
  misc_feature (567)..(567): n is a, c, g, or t
  misc_feature (573)..(573): n is a, c, g, or t
  misc_feature (576)..(576): n is a, c, g, or t
  misc_feature (579)..(579): n is a, c, g, or t
  misc_feature (585)..(585): n is a, c, g, or t
  misc_feature (591)..(591): n is a, c, g, or t
  misc_feature (594)..(594): n is a, c, g, or t
  misc_feature (600)..(600): n is a, c, g, or t
  misc_feature (603)..(603): n is a, c, g, or t
  misc_feature (606)..(606): n is a, c, g, or t
  misc_feature (609)..(609): n is a, c, g, or t
  misc_feature (612)..(612): n is a, c, g, or t
  misc_feature (615)..(615): n is a, c, g, or t
  misc_feature (618)..(618): n is a, c, g, or t
  misc_feature (621)..(621): n is a, c, g, or t
  misc_feature (624)..(624): n is a, c, g, or t
  misc_feature (627)..(627): n is a, c, g, or t
  misc_feature (633)..(633): n is a, c, g, or t
  misc_feature (639)..(639): n is a, c, g, or t
  misc_feature (648)..(648): n is a, c, g, or t
  misc_feature (651)..(651): n is a, c, g, or t
  misc_feature (654)..(654): n is a, c, g, or t
  misc_feature (657)..(657): n is a, c, g, or t
  misc_feature (660)..(660): n is a, c, g, or t
  misc_feature (663)..(663): n is a, c, g, or t
  misc_feature (672)..(672): n is a, c, g, or t
  misc_feature (675)..(675): n is a, c, g, or t
  misc_feature (681)..(681): n is a, c, g, or t
  misc_feature (690)..(690): n is a, c, g, or t
  misc_feature (696)..(696): n is a, c, g, or t
  misc_feature (699)..(699): n is a, c, g, or t
  misc_feature (705)..(705): n is a, c, g, or t
  misc_feature (708)..(708): n is a, c, g, or t
  misc_feature (711)..(711): n is a, c, g, or t
  misc_feature (717)..(717): n is a, c, g, or t
  misc_feature (720)..(720): n is a, c, g, or t
  misc_feature (723)..(723): n is a, c, g, or t
  misc_feature (726)..(726): n is a, c, g, or t
  misc_feature (729)..(729): n is a, c, g, or t
  misc_feature (732)..(732): n is a, c, g, or t
  misc_feature (738)..(738): n is a, c, g, or t
  misc_feature (744)..(744): n is a, c, g, or t
  misc_feature (747)..(747): n is a, c, g, or t
  misc_feature (750)..(750): n is a, c, g, or t
  misc_feature (753)..(753): n is a, c, g, or t
  misc_feature (756)..(756): n is a, c, g, or t
  misc_feature (759)..(759): n is a, c, g, or t
  misc_feature (762)..(762): n is a, c, g, or t
  misc_feature (765)..(765): n is a, c, g, or t
  misc_feature (768)..(768): n is a, c, g, or t
  misc_feature (771)..(771): n is a, c, g, or t
  misc_feature (774)..(774): n is a, c, g, or t
  misc_feature (777)..(777): n is a, c, g, or t
  misc_feature (780)..(780): n is a, c, g, or t
  misc_feature (783)..(783): n is a, c, g, or t
  misc_feature (786)..(786): n is a, c, g, or t
  misc_feature (792)..(792): n is a, c, g, or t
  misc_feature (798)..(798): n is a, c, g, or t
  misc_feature (804)..(804): n is a, c, g, or t
  misc_feature (807)..(807): n is a, c, g, or t
  misc_feature (813)..(813): n is a, c, g, or t
  misc_feature (816)..(816): n is a, c, g, or t
  misc_feature (822)..(822): n is a, c, g, or t
  misc_feature (825)..(825): n is a, c, g, or t
  misc_feature (828)..(828): n is a, c, g, or t
  misc_feature (831)..(831): n is a, c, g, or t
  misc_feature (837)..(837): n is a, c, g, or t
  misc_feature (840)..(840): n is a, c, g, or t
  misc_feature (843)..(843): n is a, c, g, or t
  misc_feature (846)..(846): n is a, c, g, or t
  misc_feature (849)..(849): n is a, c, g, or t
  misc_feature (852)..(852): n is a, c, g, or t
  misc_feature (855)..(855): n is a, c, g, or t
  misc_feature (858)..(858): n is a, c, g, or t
  misc_feature (861)..(861): n is a, c, g, or t
  misc_feature (864)..(864): n is a, c, g, or t
  misc_feature (867)..(867): n is a, c, g, or t
  misc_feature (870)..(870): n is a, c, g, or t
  misc_feature (876)..(876): n is a, c, g, or t
  misc_feature (885)..(885): n is a, c, g, or t
  misc_feature (891)..(891): n is a, c, g, or t
  misc_feature (894)..(894): n is a, c, g, or t
  misc_feature (903)..(903): n is a, c, g, or t
  misc_feature (909)..(909): n is a, c, g, or t
  misc_feature (915)..(915): n is a, c, g, or t
  misc_feature (924)..(924): n is a, c, g, or t
  misc_feature (933)..(933): n is a, c, g, or t
  misc_feature (936)..(936): n is a, c, g, or t
  misc_feature (939)..(939): n is a, c, g, or t
  misc_feature (942)..(942): n is a, c, g, or t
  misc_feature (945)..(945): n is a, c, g, or t
  misc_feature (948)..(948): n is a, c, g, or t
  misc_feature (951)..(951): n is a, c, g, or t
  misc_feature (954)..(954): n is a, c, g, or t
  misc_feature (960)..(960): n is a, c, g, or t
  misc_feature (966)..(966): n is a, c, g, or t
  misc_feature (969)..(969): n is a, c, g, or t
  misc_feature (978)..(978): n is a, c, g, or t
  misc_feature (984)..(984): n is a, c, g, or t
  misc_feature (987)..(987): n is a, c, g, or t
  misc_feature (990)..(990): n is a, c, g, or t
  misc_feature (996)..(996): n is a, c, g, or t
  misc_feature (1002)..(1002): n is a, c, g, or t
  misc_feature (1005)..(1005): n is a, c, g, or t
  misc_feature (1011)..(1011): n is a, c, g, or t
  misc_feature (1014)..(1014): n is a, c, g, or t
  misc_feature (1023)..(1023): n is a, c, g, or t
  misc_feature (1026)..(1026): n is a, c, g, or t
  misc_feature (1029)..(1029): n is a, c, g, or t
  misc_feature (1032)..(1032): n is a, c, g, or t
  misc_feature (1038)..(1038): n is a, c, g, or t
  misc_feature (1041)..(1041): n is a, c, g, or t
  misc_feature (1044)..(1044): n is a, c, g, or t
  misc_feature (1050)..(1050): n is a, c, g, or t
  misc_feature (1053)..(1053): n is a, c, g, or t
  misc_feature (1056)..(1056): n is a, c, g, or t
  misc_feature (1059)..(1059): n is a, c, g, or t
  misc_feature (1068)..(1068): n is a, c, g, or t
  misc_feature (1071)..(1071): n is a, c, g, or t
  misc_feature (1074)..(1074): n is a, c, g, or t
  misc_feature (1077)..(1077): n is a, c, g, or t
  misc_feature (1080)..(1080): n is a, c, g, or t
  misc_feature (1086)..(1086): n is a, c, g, or t
  misc_feature (1089)..(1089): n is a, c, g, or t
  misc_feature (1095)..(1095): n is a, c, g, or t
  misc_feature (1101)..(1101): n is a, c, g, or t
  misc_feature (1104)..(1104): n is a, c, g, or t
  misc_feature (1107)..(1107): n is a, c, g, or t
  misc_feature (1113)..(1113): n is a, c, g, or t
  misc_feature (1116)..(1116): n is a, c, g, or t
  misc_feature (1122)..(1122): n is a, c, g, or t
  misc_feature (1128)..(1128): n is a, c, g, or t
  misc_feature (1131)..(1131): n is a, c, g, or t
  misc_feature (1137)..(1137): n is a, c, g, or t
  misc_feature (1140)..(1140): n is a, c, g, or t
  misc_feature (1143)..(1143): n is a, c, g, or t
  misc_feature (1146)..(1146): n is a, c, g, or t
  misc_feature (1149)..(1149): n is a, c, g, or t
  misc_feature (1152)..(1152): n is a, c, g, or t
  misc_feature (1155)..(1155): n is a, c, g, or t
  misc_feature (1158)..(1158): n is a, c, g, or t
  misc_feature (1167)..(1167): n is a, c, g, or t
  misc_feature (1176)..(1176): n is a, c, g, or t
  misc_feature (1179)..(1179): n is a, c, g, or t
  misc_feature (1182)..(1182): n is a, c, g, or t
  misc_feature (1185)..(1185): n is a, c, g, or t
  misc_feature (1188)..(1188): n is a, c, g, or t
  misc_feature (1194)..(1194): n is a, c, g, or t
  misc_feature (1197)..(1197): n is a, c, g, or t
  misc_feature (1203)..(1203): n is a, c, g, or t
  misc_feature (1209)..(1209): n is a, c, g, or t
  misc_feature (1212)..(1212): n is a, c, g, or t
  misc_feature (1215)..(1215): n is a, c, g, or t
  misc_feature (1218)..(1218): n is a, c, g, or t
  misc_feature (1221)..(1221): n is a, c, g, or t
  misc_feature (1224)..(1224): n is a, c, g, or t
  misc_feature (1227)..(1227): n is a, c, g, or t
  misc_feature (1230)..(1230): n is a, c, g, or t
  misc_feature (1236)..(1236): n is a, c, g, or t
  misc_feature (1245)..(1245): n is a, c, g, or t
  misc_feature (1248)..(1248): n is a, c, g, or t
  misc_feature (1251)..(1251): n is a, c, g, or t
  misc_feature (1254)..(1254): n is a, c, g, or t
  misc_feature (1260)..(1260): n is a, c, g, or t
  misc_feature (1263)..(1263): n is a, c, g, or t
  misc_feature (1269)..(1269): n is a, c, g, or t
  misc_feature (1272)..(1272): n is a, c, g, or t
  misc_feature (1278)..(1278): n is a, c, g, or t
  misc_feature (1281)..(1281): n is a, c, g, or t
  misc_feature (1284)..(1284): n is a, c, g, or t
  misc_feature (1290)..(1290): n is a, c, g, or t
  misc_feature (1293)..(1293): n is a, c, g, or t
  misc_feature (1296)..(1296): n is a, c, g, or t
  misc_feature (1299)..(1299): n is a, c, g, or t
  misc_feature (1308)..(1308): n is a, c, g, or t
  misc_feature (1311)..(1311): n is a, c, g, or t
  misc_feature (1314)..(1314): n is a, c, g, or t
  misc_feature (1317)..(1317): n is a, c, g, or t
  misc_feature (1320)..(1320): n is a, c, g, or t
  misc_feature (1323)..(1323): n is a, c, g, or t
  misc_feature (1326)..(1326): n is a, c, g, or t
  misc_feature (1329)..(1329): n is a, c, g, or t
  misc_feature (1332)..(1332): n is a, c, g, or t
  misc_feature (1335)..(1335): n is a, c, g, or t
  misc_feature (1341)..(1341): n is a, c, g, or t
  misc_feature (1347)..(1347): n is a, c, g, or t
  misc_feature (1350)..(1350): n is a, c, g, or t
  misc_feature (1356)..(1356): n is a, c, g, or t
  misc_feature (1359)..(1359): n is a, c, g, or t
  misc_feature (1365)..(1365): n is a, c, g, or t
  misc_feature (1368)..(1368): n is a, c, g, or t
  misc_feature (1371)..(1371): n is a, c, g, or t
  misc_feature (1374)..(1374): n is a, c, g, or t
  misc_feature (1377)..(1377): n is a, c, g, or t
  misc_feature (1380)..(1380): n is a, c, g, or t
  misc_feature (1383)..(1383): n is a, c, g, or t
  misc_feature (1386)..(1386): n is a, c, g, or t
  misc_feature (1392)..(1392): n is a, c, g, or t
  misc_feature (1395)..(1395): n is a, c, g, or t
  misc_feature (1398)..(1398): n is a, c, g, or t
  misc_feature (1401)..(1401): n is a, c, g, or t
  misc_feature (1404)..(1404): n is a, c, g, or t
  misc_feature (1407)..(1407): n is a, c, g, or t
  misc_feature (1410)..(1410): n is a, c, g, or t
  misc_feature (1413)..(1413): n is a, c, g, or t
  misc_feature (1416)..(1416): n is a, c, g, or t
  misc_feature (1419)..(1419): n is a, c, g, or t
  misc_feature (1422)..(1422): n is a, c, g, or t
  misc_feature (1440)..(1440): n is a, c, g, or t
  misc_feature (1446)..(1446): n is a, c, g, or t
  misc_feature (1452)..(1452): n is a, c, g, or t
  misc_feature (1455)..(1455): n is a, c, g, or t
  misc_feature (1458)..(1458): n is a, c, g, or t
  misc_feature (1461)..(1461): n is a, c, g, or t
  misc_feature (1464)..(1464): n is a, c, g, or t
  misc_feature (1470)..(1470): n is a, c, g, or t
  misc_feature (1479)..(1479): n is a, c, g, or t
  misc_feature (1488)..(1488): n is a, c, g, or t
  misc_feature (1491)..(1491): n is a, c, g, or t
  misc_feature (1500)..(1500): n is a, c, g, or t
  misc_feature (1503)..(1503): n is a, c, g, or t
  misc_feature (1506)..(1506): n is a, c, g, or t
  misc_feature (1512)..(1512): n is a, c, g, or t
  misc_feature (1515)..(1515): n is a, c, g, or t
  misc_feature (1518)..(1518): n is a, c, g, or t
  misc_feature (1521)..(1521): n is a, c, g, or t
  misc_feature (1524)..(1524): n is a, c, g, or t
  misc_feature (1527)..(1527): n is a, c, g, or t
  misc_feature (1530)..(1530): n is a, c, g, or t
  misc_feature (1533)..(1533): n is a, c, g, or t
  misc_feature (1536)..(1536): n is a, c, g, or t
  misc_feature (1539)..(1539): n is a, c, g, or t
  misc_feature (1542)..(1542): n is a, c, g, or t
  misc_feature (1545)..(1545): n is a, c, g, or t
  misc_feature (1548)..(1548): n is a, c, g, or t
  misc_feature (1551)..(1551): n is a, c, g, or t
  misc_feature (1557)..(1557): n is a, c, g, or t
  misc_feature (1560)..(1560): n is a, c, g, or t
  misc_feature (1563)..(1563): n is a, c, g, or t
  misc_feature (1566)..(1566): n is a, c, g, or t
  misc_feature (1572)..(1572): n is a, c, g, or t
  misc_feature (1575)..(1575): n is a, c, g, or t
  misc_feature (1581)..(1581): n is a, c, g, or t
  misc_feature (1584)..(1584): n is a, c, g, or t
  misc_feature (1587)..(1587): n is a, c, g, or t
  misc_feature (1593)..(1593): n is a, c, g, or t
  misc_feature (1596)..(1596): n is a, c, g, or t
  misc_feature (1599)..(1599): n is a, c, g, or t
  misc_feature (1602)..(1602): n is a, c, g, or t
  misc_feature (1605)..(1605): n is a, c, g, or t
  misc_feature (1608)..(1608): n is a, c, g, or t
  misc_feature (1611)..(1611): n is a, c, g, or t
  misc_feature (1614)..(1614): n is a, c, g, or t
  misc_feature (1617)..(1617): n is a, c, g, or t
  misc_feature (1620)..(1620): n is a, c, g, or t
  misc_feature (1626)..(1626): n is a, c, g, or t
  misc_feature (1629)..(1629): n is a, c, g, or t
  misc_feature (1632)..(1632): n is a, c, g, or t
  misc_feature (1638)..(1638): n is a, c, g, or t
  misc_feature (1644)..(1644): n is a, c, g, or t
  misc_feature (1647)..(1647): n is a, c, g, or t
  misc_feature (1650)..(1650): n is a, c, g, or t
  misc_feature (1653)..(1653): n is a, c, g, or t
  misc_feature (1656)..(1656): n is a, c, g, or t
  misc_feature (1665)..(1665): n is a, c, g, or t
  misc_feature (1668)..(1668): n is a, c, g, or t
  misc_feature (1671)..(1671): n is a, c, g, or t
  misc_feature (1674)..(1674): n is a, c, g, or t
  misc_feature (1677)..(1677): n is a, c, g, or t
  misc_feature (1683)..(1683): n is a, c, g, or t
  misc_feature (1686)..(1686): n is a, c, g, or t
  misc_feature (1689)..(1689): n is a, c, g, or t
  misc_feature (1692)..(1692): n is a, c, g, or t
  misc_feature (1695)..(1695): n is a, c, g, or t
  misc_feature (1698)..(1698): n is a, c, g, or t
  misc_feature (1701)..(1701): n is a, c, g, or t
  misc_feature (1704)..(1704): n is a, c, g, or t
  misc_feature (1710)..(1710): n is a, c, g, or t
  misc_feature (1713)..(1713): n is a, c, g, or t
  misc_feature (1716)..(1716): n is a, c, g, or t
  misc_feature (1719)..(1719): n is a, c, g, or t
  misc_feature (1722)..(1722): n is a, c, g, or t
  misc_feature (1728)..(1728): n is a, c, g, or t
  misc_feature (1731)..(1731): n is a, c, g, or t
  misc_feature (1734)..(1734): n is a, c, g, or t
  misc_feature (1737)..(1737): n is a, c, g, or t
  misc_feature (1740)..(1740): n is a, c, g, or t
  misc_feature (1746)..(1746): n is a, c, g, or t
  misc_feature (1749)..(1749): n is a, c, g, or t
  misc_feature (1752)..(1752): n is a, c, g, or t
  misc_feature (1755)..(1755): n is a, c, g, or t
  misc_feature (1761)..(1761): n is a, c, g, or t
  misc_feature (1764)..(1764): n is a, c, g, or t
  misc_feature (1767)..(1767): n is a, c, g, or t
  misc_feature (1770)..(1770): n is a, c, g, or t
  misc_feature (1773)..(1773): n is a, c, g, or t
  misc_feature (1779)..(1779): n is a, c, g, or t
  misc_feature (1782)..(1782): n is a, c, g, or t
  misc_feature (1785)..(1785): n is a, c, g, or t
  misc_feature (1788)..(1788): n is a, c, g, or t
  misc_feature (1794)..(1794): n is a, c, g, or t
  misc_feature (1797)..(1797): n is a, c, g, or t
  misc_feature (1800)..(1800): n is a, c, g, or t
  misc_feature (1803)..(1803): n is a, c, g, or t
  misc_feature (1806)..(1806): n is a, c, g, or t
  misc_feature (1812)..(1812): n is a, c, g, or t
  misc_feature (1815)..(1815): n is a, c, g, or t
  misc_feature (1818)..(1818): n is a, c, g, or t
  misc_feature (1821)..(1821): n is a, c, g, or t
  misc_feature (1824)..(1824): n is a, c, g, or t
  misc_feature (1830)..(1830): n is a, c, g, or t
  misc_feature (1833)..(1833): n is a, c, g, or t
  misc_feature (1836)..(1836): n is a, c, g, or t
  misc_feature (1842)..(1842): n is a, c, g, or t
  misc_feature (1845)..(1845): n is a, c, g, or t
  misc_feature (1848)..(1848): n is a, c, g, or t
  misc_feature (1851)..(1851): n is a, c, g, or t
  misc_feature (1857)..(1857): n is a, c, g, or t
  misc_feature (1860)..(1860): n is a, c, g, or t
  misc_feature (1863)..(1863): n is a, c, g, or t
  misc_feature (1866)..(1866): n is a, c, g, or t
  misc_feature (1869)..(1869): n is a, c, g, or t
  misc_feature (1875)..(1875): n is a, c, g, or t
  misc_feature (1878)..(1878): n is a, c, g, or t
  misc_feature (1881)..(1881): n is a, c, g, or t
  misc_feature (1887)..(1887): n is a, c, g, or t
  misc_feature (1893)..(1893): n is a, c, g, or t
  misc_feature (1896)..(1896): n is a, c, g, or t
  misc_feature (1902)..(1902): n is a, c, g, or t
  misc_feature (1905)..(1905): n is a, c, g, or t
  misc_feature (1908)..(1908): n is a, c, g, or t
  misc_feature (1914)..(1914): n is a, c, g, or t
  misc_feature (1920)..(1920): n is a, c, g, or t
  misc_feature (1923)..(1923): n is a, c, g, or t
  misc_feature (1926)..(1926): n is a, c, g, or t
  misc_feature (1929)..(1929): n is a, c, g, or t
  misc_feature (1932)..(1932): n is a, c, g, or t
  misc_feature (1935)..(1935): n is a, c, g, or t
  misc_feature (1938)..(1938): n is a, c, g, or t
  misc_feature (1941)..(1941): n is a, c, g, or t
  misc_feature (1947)..(1947): n is a, c, g, or t
  misc_feature (1950)..(1950): n is a, c, g, or t
  misc_feature (1953)..(1953): n is a, c, g, or t
  misc_feature (1959)..(1959): n is a, c, g, or t
  misc_feature (1962)..(1962): n is a, c, g, or t
  misc_feature (1965)..(1965): n is a, c, g, or t
  misc_feature (1968)..(1968): n is a, c, g, or t
  misc_feature (1971)..(1971): n is a, c, g, or t
  misc_feature (1977)..(1977): n is a, c, g, or t
  misc_feature (1983)..(1983): n is a, c, g, or t
  misc_feature (1986)..(1986): n is a, c, g, or t
  misc_feature (1989)..(1989): n is a, c, g, or t
  misc_feature (1992)..(1992): n is a, c, g, or t
  misc_feature (1995)..(1995): n is a, c, g, or t
  misc_feature (2004)..(2004): n is a, c, g, or t
  misc_feature (2007)..(2007): n is a, c, g, or t
  misc_feature (2010)..(2010): n is a, c, g, or t
  misc_feature (2013)..(2013): n is a, c, g, or t
  misc_feature (2016)..(2016): n is a, c, g, or t
  misc_feature (2019)..(2019): n is a, c, g, or t
  misc_feature (2022)..(2022): n is a, c, g, or t
  misc_feature (2028)..(2028): n is a, c, g, or t
  misc_feature (2031)..(2031): n is a, c, g, or t
  misc_feature (2034)..(2034): n is a, c, g, or t
  misc_feature (2040)..(2040): n is a, c, g, or t
  misc_feature (2043)..(2043): n is a, c, g, or t
  misc_feature (2046)..(2046): n is a, c, g, or t
  misc_feature (2049)..(2049): n is a, c, g, or t
  misc_feature (2055)..(2055): n is a, c, g, or t
  misc_feature (2058)..(2058): n is a, c, g, or t
  misc_feature (2064)..(2064): n is a, c, g, or t
  misc_feature (2067)..(2067): n is a, c, g, or t
  misc_feature (2073)..(2073): n is a, c, g, or t
  misc_feature (2076)..(2076): n is a, c, g, or t
  misc_feature (2079)..(2079): n is a, c, g, or t
  misc_feature (2082)..(2082): n is a, c, g, or t
  misc_feature (2085)..(2085): n is a, c, g, or t
  misc_feature (2088)..(2088): n is a, c, g, or t
  misc_feature (2091)..(2091): n is a, c, g, or t
  misc_feature (2094)..(2094): n is a, c, g, or t
  misc_feature (2103)..(2103): n is a, c, g, or t
  misc_feature (2106)..(2106): n is a, c, g, or t
  misc_feature (2109)..(2109): n is a, c, g, or t
  misc_feature (2112)..(2112): n is a, c, g, or t
  misc_feature (2118)..(2118): n is a, c, g, or t
  misc_feature (2121)..(2121): n is a, c, g, or t
  misc_feature (2127)..(2127): n is a, c, g, or t
  misc_feature (2130)..(2130): n is a, c, g, or t
  misc_feature (2136)..(2136): n is a, c, g, or t
  misc_feature (2139)..(2139): n is a, c, g, or t
  misc_feature (2148)..(2148): n is a, c, g, or t
  misc_feature (2154)..(2154): n is a, c, g, or t
  misc_feature (2157)..(2157): n is a, c, g, or t
  misc_feature (2160)..(2160): n is a, c, g, or t
  misc_feature (2163)..(2163): n is a, c, g, or t
  misc_feature (2166)..(2166): n is a, c, g, or t
  misc_feature (2175)..(2175): n is a, c, g, or t
  misc_feature (2184)..(2184): n is a, c, g, or t
  misc_feature (2190)..(2190): n is a, c, g, or t
  misc_feature (2193)..(2193): n is a, c, g, or t
  misc_feature (2196)..(2196): n is a, c, g, or t
  misc_feature (2199)..(2199): n is a, c, g, or t
  misc_feature (2202)..(2202): n is a, c, g, or t
  misc_feature (2205)..(2205): n is a, c, g, or t
  misc_feature (2211)..(2211): n is a, c, g, or t
  misc_feature (2217)..(2217): n is a, c, g, or t
  misc_feature (2220)..(2220): n is a, c, g, or t
  misc_feature (2223)..(2223): n is a, c, g, or t
  misc_feature (2226)..(2226): n is a, c, g, or t
  misc_feature (2229)..(2229): n is a, c, g, or t
  misc_feature (2238)..(2238): n is a, c, g, or t
  misc_feature (2247)..(2247): n is a, c, g, or t
  misc_feature (2253)..(2253): n is a, c, g, or t
  misc_feature (2256)..(2256): n is a, c, g, or t
  misc_feature (2259)..(2259): n is a, c, g, or t
  misc_feature (2265)..(2265): n is a, c, g, or t
  misc_feature (2268)..(2268): n is a, c, g, or t
  misc_feature (2271)..(2271): n is a, c, g, or t
  misc_feature (2274)..(2274): n is a, c, g, or t
  misc_feature (2280)..(2280): n is a, c, g, or t
  misc_feature (2283)..(2283): n is a, c, g, or t
  misc_feature (2286)..(2286): n is a, c, g, or t
  misc_feature (2292)..(2292): n is a, c, g, or t
  misc_feature (2298)..(2298): n is a, c, g, or t
  misc_feature (2301)..(2301): n is a, c, g, or t
  misc_feature (2310)..(2310): n is a, c, g, or t
  misc_feature (2316)..(2316): n is a, c, g, or t
  misc_feature (2319)..(2319): n is a, c, g, or t
  misc_feature (2322)..(2322): n is a, c, g, or t
  misc_feature (2328)..(2328): n is a, c, g, or t
  misc_feature (2331)..(2331): n is a, c, g, or t
  misc_feature (2334)..(2334): n is a, c, g, or t
  misc_feature (2337)..(2337): n is a, c, g, or t
  misc_feature (2343)..(2343): n is a, c, g, or t
  misc_feature (2346)..(2346): n is a, c, g, or t
  misc_feature (2355)..(2355): n is a, c, g, or t
  misc_feature (2358)..(2358): n is a, c, g, or t
  misc_feature (2361)..(2361): n is a, c, g, or t
  misc_feature (2364)..(2364): n is a, c, g, or t
  misc_feature (2370)..(2370): n is a, c, g, or t
  misc_feature (2373)..(2373): n is a, c, g, or t
  misc_feature (2376)..(2376): n is a, c, g, or t
  misc_feature (2379)..(2379): n is a, c, g, or t
  misc_feature (2382)..(2382): n is a, c, g, or t
  misc_feature (2385)..(2385): n is a, c, g, or t
  misc_feature (2388)..(2388): n is a, c, g, or t
  misc_feature (2391)..(2391): n is a, c, g, or t
  misc_feature (2394)..(2394): n is a, c, g, or t
  misc_feature (2400)..(2400): n is a, c, g, or t
  misc_feature (2403)..(2403): n is a, c, g, or t
  misc_feature (2406)..(2406): n is a, c, g, or t
  misc_feature (2424)..(2424): n is a, c, g, or t
  misc_feature (2433)..(2433): n is a, c, g, or t
  misc_feature (2442)..(2442): n is a, c, g, or t
  misc_feature (2445)..(2445): n is a, c, g, or t
  misc_feature (2451)..(2451): n is a, c, g, or t
  misc_feature (2454)..(2454): n is a, c, g, or t
  misc_feature (2460)..(2460): n is a, c, g, or t
  misc_feature (2466)..(2466): n is a, c, g, or t
  misc_feature (2469)..(2469): n is a, c, g, or t
  misc_feature (2472)..(2472): n is a, c, g, or t
  misc_feature (2478)..(2478): n is a, c, g, or t
  misc_feature (2487)..(2487): n is a, c, g, or t
  misc_feature (2493)..(2493): n is a, c, g, or t
  misc_feature (2496)..(2496): n is a, c, g, or t
  misc_feature (2502)..(2502): n is a, c, g, or t
  misc_feature (2505)..(2505): n is a, c, g, or t
  misc_feature (2508)..(2508): n is a, c, g, or t
  misc_feature (2511)..(2511): n is a, c, g, or t
  misc_feature (2514)..(2514): n is a, c, g, or t
  misc_feature (2520)..(2520): n is a, c, g, or t
  misc_feature (2523)..(2523): n is a, c, g, or t
  misc_feature (2526)..(2526): n is a, c, g, or t
  misc_feature (2529)..(2529): n is a, c, g, or t
  misc_feature (2532)..(2532): n is a, c, g, or t
  misc_feature (2535)..(2535): n is a, c, g, or t
  misc_feature (2538)..(2538): n is a, c, g, or t
  misc_feature (2541)..(2541): n is a, c, g, or t
  misc_feature (2553)..(2553): n is a, c, g, or t
  misc_feature (2556)..(2556): n is a, c, g, or t
  misc_feature (2562)..(2562): n is a, c, g, or t
  misc_feature (2571)..(2571): n is a, c, g, or t
  misc_feature (2574)..(2574): n is a, c, g, or t
  misc_feature (2577)..(2577): n is a, c, g, or t
  misc_feature (2580)..(2580): n is a, c, g, or t
  misc_feature (2586)..(2586): n is a, c, g, or t
  misc_feature (2589)..(2589): n is a, c, g, or t
  misc_feature (2592)..(2592): n is a, c, g, or t
  misc_feature (2595)..(2595): n is a, c, g, or t
  misc_feature (2598)..(2598): n is a, c, g, or t
  misc_feature (2604)..(2604): n is a, c, g, or t
  misc_feature (2607)..(2607): n is a, c, g, or t
  misc_feature (2610)..(2610): n is a, c, g, or t
  misc_feature (2613)..(2613): n is a, c, g, or t
  misc_feature (2616)..(2616): n is a, c, g, or t
  misc_feature (2619)..(2619): n is a, c, g, or t
  misc_feature (2622)..(2622): n is a, c, g, or t
  misc_feature (2625)..(2625): n is a, c, g, or t
  misc_feature (2631)..(2631): n is a, c, g, or t
  misc_feature (2634)..(2634): n is a, c, g, or t
  misc_feature (2640)..(2640): n is a, c, g, or t
  misc_feature (2643)..(2643): n is a, c, g, or t
  misc_feature (2652)..(2652): n is a, c, g, or t
  misc_feature (2655)..(2655): n is a, c, g, or t
  misc_feature (2658)..(2658): n is a, c, g, or t
  misc_feature (2661)..(2661): n is a, c, g, or t
  misc_feature (2670)..(2670): n is a, c, g, or t
  misc_feature (2673)..(2673): n is a, c, g, or t
  misc_feature (2676)..(2676): n is a, c, g, or t
  misc_feature (2679)..(2679): n is a, c, g, or t
  misc_feature (2682)..(2682): n is a, c, g, or t
  misc_feature (2685)..(2685): n is a, c, g, or t
  misc_feature (2688)..(2688): n is a, c, g, or t
  misc_feature (2691)..(2691): n is a, c, g, or t
  misc_feature (2697)..(2697): n is a, c, g, or t
  misc_feature (2706)..(2706): n is a, c, g, or t
  misc_feature (2709)..(2709): n is a, c, g, or t
  misc_feature (2712)..(2712): n is a, c, g, or t
  misc_feature (2715)..(2715): n is a, c, g, or t
  misc_feature (2724)..(2724): n is a, c, g, or t
  misc_feature (2733)..(2733): n is a, c, g, or t
  misc_feature (2739)..(2739): n is a, c, g, or t
  misc_feature (2748)..(2748): n is a, c, g, or t
  misc_feature (2751)..(2751): n is a, c, g, or t
  misc_feature (2754)..(2754): n is a, c, g, or t
  misc_feature (2757)..(2757): n is a, c, g, or t
  misc_feature (2760)..(2760): n is a, c, g, or t
  misc_feature (2763)..(2763): n is a, c, g, or t
  misc_feature (2766)..(2766): n is a, c, g, or t
  misc_feature (2772)..(2772): n is a, c, g, or t
  misc_feature (2778)..(2778): n is a, c, g, or t
  misc_feature (2781)..(2781): n is a, c, g, or t
  misc_feature (2784)..(2784): n is a, c, g, or t
  misc_feature (2787)..(2787): n is a, c, g, or t
  misc_feature (2790)..(2790): n is a, c, g, or t
  misc_feature (2796)..(2796): n is a, c, g, or t
  misc_feature (2799)..(2799): n is a, c, g, or t
  misc_feature (2802)..(2802): n is a, c, g, or t
  misc_feature (2808)..(2808): n is a, c, g, or t
  misc_feature (2817)..(2817): n is a, c, g, or t
  misc_feature (2826)..(2826): n is a, c, g, or t
  misc_feature (2829)..(2829): n is a, c, g, or t
  misc_feature (2835)..(2835): n is a, c, g, or t
  misc_feature (2844)..(2844): n is a, c, g, or t
  misc_feature (2850)..(2850): n is a, c, g, or t
  misc_feature (2853)..(2853): n is a, c, g, or t
  misc_feature (2859)..(2859): n is a, c, g, or t
  misc_feature (2862)..(2862): n is a, c, g, or t
  misc_feature (2865)..(2865): n is a, c, g, or t
  misc_feature (2868)..(2868): n is a, c, g, or t
  misc_feature (2871)..(2871): n is a, c, g, or t
  misc_feature (2874)..(2874): n is a, c, g, or t
  misc_feature (2880)..(2880): n is a, c, g, or t
  misc_feature (2883)..(2883): n is a, c, g, or t
  misc_feature (2886)..(2886): n is a, c, g, or t
  misc_feature (2889)..(2889): n is a, c, g, or t
  misc_feature (2892)..(2892): n is a, c, g, or t
  misc_feature (2898)..(2898): n is a, c, g, or t
  misc_feature (2904)..(2904): n is a, c, g, or t
  misc_feature (2907)..(2907): n is a, c, g, or t
  misc_feature (2913)..(2913): n is a, c, g, or t
  misc_feature (2916)..(2916): n is a, c, g, or t
  misc_feature (2919)..(2919): n is a, c, g, or t
  misc_feature (2922)..(2922): n is a, c, g, or t
  misc_feature (2925)..(2925): n is a, c, g, or t
  misc_feature (2928)..(2928): n is a, c, g, or t
  misc_feature (2931)..(2931): n is a, c, g, or t
  misc_feature (2934)..(2934): n is a, c, g, or t
  misc_feature (2937)..(2937): n is a, c, g, or t
  misc_feature (2943)..(2943): n is a, c, g, or t
  misc_feature (2949)..(2949): n is a, c, g, or t
  misc_feature (2952)..(2952): n is a, c, g, or t
  misc_feature (2955)..(2955): n is a, c, g, or t
  misc_feature (2961)..(2961): n is a, c, g, or t
  misc_feature (2964)..(2964): n is a, c, g, or t
  misc_feature (2967)..(2967): n is a, c, g, or t
  misc_feature (2970)..(2970): n is a, c, g, or t
  misc_feature (2973)..(2973): n is a, c, g, or t
  misc_feature (2979)..(2979): n is a, c, g, or t
  misc_feature (2988)..(2988): n is a, c, g, or t
  misc_feature (2994)..(2994): n is a, c, g, or t
  misc_feature (2997)..(2997): n is a, c, g, or t
  misc_feature (3000)..(3000): n is a, c, g, or t
  misc_feature (3003)..(3003): n is a, c, g, or t
  misc_feature (3006)..(3006): n is a, c, g, or t
  misc_feature (3009)..(3009): n is a, c, g, or t
  misc_feature (3012)..(3012): n is a, c, g, or t
  misc_feature (3015)..(3015): n is a, c, g, or t
  misc_feature (3021)..(3021): n is a, c, g, or t
  misc_feature (3024)..(3024): n is a, c, g, or t
  misc_feature (3027)..(3027): n is a, c, g, or t
  misc_feature (3030)..(3030): n is a, c, g, or t
  misc_feature (3033)..(3033): n is a, c, g, or t
  misc_feature (3039)..(3039): n is a, c, g, or t
  misc_feature (3042)..(3042): n is a, c, g, or t
  misc_feature (3045)..(3045): n is a, c, g, or t
  misc_feature (3051)..(3051): n is a, c, g, or t
  misc_feature (3054)..(3054): n is a, c, g, or t
  misc_feature (3057)..(3057): n is a, c, g, or t
  misc_feature (3060)..(3060): n is a, c, g, or t
  misc_feature (3063)..(3063): n is a, c, g, or t
  misc_feature (3069)..(3069): n is a, c, g, or t
  misc_feature (3075)..(3075): n is a, c, g, or t
  misc_feature (3078)..(3078): n is a, c, g, or t
  misc_feature (3081)..(3081): n is a, c, g, or t
  misc_feature (3084)..(3084): n is a, c, g, or t
  misc_feature (3087)..(3087): n is a, c, g, or t
  misc_feature (3090)..(3090): n is a, c, g, or t
  misc_feature (3102)..(3102): n is a, c, g, or t
  misc_feature (3108)..(3108): n is a, c, g, or t
  misc_feature (3111)..(3111): n is a, c, g, or t
  misc_feature (3117)..(3117): n is a, c, g, or t
  misc_feature (3120)..(3120): n is a, c, g, or t
  misc_feature (3123)..(3123): n is a, c, g, or t
  misc_feature (3126)..(3126): n is a, c, g, or t
  misc_feature (3129)..(3129): n is a, c, g, or t
  misc_feature (3135)..(3135): n is a, c, g, or t
  misc_feature (3138)..(3138): n is a, c, g, or t
  misc_feature (3144)..(3144): n is a, c, g, or t
  misc_feature (3147)..(3147): n is a, c, g, or t
  misc_feature (3153)..(3153): n is a, c, g, or t
  misc_feature (3159)..(3159): n is a, c, g, or t
  misc_feature (3162)..(3162): n is a, c, g, or t
  misc_feature (3165)..(3165): n is a, c, g, or t
  misc_feature (3168)..(3168): n is a, c, g, or t
  misc_feature (3171)..(3171): n is a, c, g, or t
  misc_feature (3174)..(3174): n is a, c, g, or t
  misc_feature (3177)..(3177): n is a, c, g, or t
  misc_feature (3180)..(3180): n is a, c, g, or t
  misc_feature (3183)..(3183): n is a, c, g, or t
  misc_feature (3186)..(3186): n is a, c, g, or t
  misc_feature (3195)..(3195): n is a, c, g, or t
  misc_feature (3204)..(3204): n is a, c, g, or t
  misc_feature (3207)..(3207): n is a, c, g, or t
  misc_feature (3210)..(3210): n is a, c, g, or t
  misc_feature (3213)..(3213): n is a, c, g, or t
  misc_feature (3219)..(3219): n is a, c, g, or t
  misc_feature (3222)..(3222): n is a, c, g, or t
  misc_feature (3225)..(3225): n is a, c, g, or t
  misc_feature (3228)..(3228): n is a, c, g, or t
  misc_feature (3231)..(3231): n is a, c, g, or t
  misc_feature (3234)..(3234): n is a, c, g, or t
  misc_feature (3237)..(3237): n is a, c, g, or t
  misc_feature (3240)..(3240): n is a, c, g, or t
  misc_feature (3243)..(3243): n is a, c, g, or t
  misc_feature (3249)..(3249): n is a, c, g, or t
  misc_feature (3255)..(3255): n is a, c, g, or t
  misc_feature (3258)..(3258): n is a, c, g, or t
  misc_feature (3264)..(3264): n is a, c, g, or t
  misc_feature (3267)..(3267): n is a, c, g, or t
  misc_feature (3270)..(3270): n is a, c, g, or t
  misc_feature (3273)..(3273): n is a, c, g, or t
  misc_feature (3282)..(3282): n is a, c, g, or t
  misc_feature (3285)..(3285): n is a, c, g, or t
  misc_feature (3288)..(3288): n is a, c, g, or t
  misc_feature (3291)..(3291): n is a, c, g, or t
  misc_feature (3294)..(3294): n is a, c, g, or t
  misc_feature (3303)..(3303): n is a, c, g, or t
  misc_feature (3306)..(3306): n is a, c, g, or t
  misc_feature (3309)..(3309): n is a, c, g, or t
  misc_feature (3312)..(3312): n is a, c, g, or t
  misc_feature (3321)..(3321): n is a, c, g, or t
  misc_feature (3324)..(3324): n is a, c, g, or t
  misc_feature (3330)..(3330): n is a, c, g, or t
  misc_feature (3336)..(3336): n is a, c, g, or t
  misc_feature (3339)..(3339): n is a, c, g, or t
  misc_feature (3342)..(3342): n is a, c, g, or t
  misc_feature (3345)..(3345): n is a, c, g, or t
  misc_feature (3348)..(3348): n is a, c, g, or t
  misc_feature (3351)..(3351): n is a, c, g, or t
  misc_feature (3354)..(3354): n is a, c, g, or t
  misc_feature (3357)..(3357): n is a, c, g, or t
  misc_feature (3360)..(3360): n is a, c, g, or t
  misc_feature (3363)..(3363): n is a, c, g, or t
  misc_feature (3366)..(3366): n is a, c, g, or t
  misc_feature (3369)..(3369): n is a, c, g, or t
  misc_feature (3372)..(3372): n is a, c, g, or t
  misc_feature (3375)..(3375): n is a, c, g, or t
  misc_feature (3378)..(3378): n is a, c, g, or t
  misc_feature (3384)..(3384): n is a, c, g, or t
  misc_feature (3390)..(3390): n is a, c, g, or t
  misc_feature (3393)..(3393): n is a, c, g, or t
  misc_feature (3399)..(3399): n is a, c, g, or t
  misc_feature (3402)..(3402): n is a, c, g, or t
  misc_feature (3405)..(3405): n is a, c, g, or t
  misc_feature (3408)..(3408): n is a, c, g, or t
  misc_feature (3411)..(3411): n is a, c, g, or t
  misc_feature (3414)..(3414): n is a, c, g, or t
  misc_feature (3417)..(3417): n is a, c, g, or t
  misc_feature (3420)..(3420): n is a, c, g, or t
  misc_feature (3423)..(3423): n is a, c, g, or t
  misc_feature (3429)..(3429): n is a, c, g, or t
  misc_feature (3435)..(3435): n is a, c, g, or t
  misc_feature (3438)..(3438): n is a, c, g, or t
  misc_feature (3444)..(3444): n is a, c, g, or t
  misc_feature (3447)..(3447): n is a, c, g, or t
  misc_feature (3450)..(3450): n is a, c, g, or t
  misc_feature (3456)..(3456): n is a, c, g, or t
  misc_feature (3459)..(3459): n is a, c, g, or t
  misc_feature (3462)..(3462): n is a, c, g, or t
  misc_feature (3465)..(3465): n is a, c, g, or t
  misc_feature (3468)..(3468): n is a, c, g, or t
  misc_feature (3474)..(3474): n is a, c, g, or t
  misc_feature (3477)..(3477): n is a, c, g, or t
  misc_feature (3480)..(3480): n is a, c, g, or t
  misc_feature (3483)..(3483): n is a, c, g, or t
  misc_feature (3492)..(3492): n is a, c, g, or t
  misc_feature (3495)..(3495): n is a, c, g, or t
  misc_feature (3498)..(3498): n is a, c, g, or t
  misc_feature (3501)..(3501): n is a, c, g, or t
  misc_feature (3510)..(3510): n is a, c, g, or t
  misc_feature (3519)..(3519): n is a, c, g, or t
  misc_feature (3525)..(3525): n is a, c, g, or t
  misc_feature (3528)..(3528): n is a, c, g, or t
  misc_feature (3531)..(3531): n is a, c, g, or t
  misc_feature (3534)..(3534): n is a, c, g, or t
  misc_feature (3537)..(3537): n is a, c, g, or t
  misc_feature (3540)..(3540): n is a, c, g, or t
  misc_feature (3543)..(3543): n is a, c, g, or t
  misc_feature (3546)..(3546): n is a, c, g, or t
  misc_feature (3552)..(3552): n is a, c, g, or t
  misc_feature (3555)..(3555): n is a, c, g, or t
  misc_feature (3558)..(3558): n is a, c, g, or t
  misc_feature (3564)..(3564): n is a, c, g, or t
  misc_feature (3567)..(3567): n is a, c, g, or t
  misc_feature (3573)..(3573): n is a, c, g, or t
  misc_feature (3579)..(3579): n is a, c, g, or t
  misc_feature (3582)..(3582): n is a, c, g, or t
  misc_feature (3588)..(3588): n is a, c, g, or t
  misc_feature (3591)..(3591): n is a, c, g, or t
  misc_feature (3594)..(3594): n is a, c, g, or t
  misc_feature (3597)..(3597): n is a, c, g, or t
  misc_feature (3600)..(3600): n is a, c, g, or t
  misc_feature (3603)..(3603): n is a, c, g, or t
  misc_feature (3606)..(3606): n is a, c, g, or t
  misc_feature (3609)..(3609): n is a, c, g, or t
  misc_feature (3612)..(3612): n is a, c, g, or t
  misc_feature (3615)..(3615): n is a, c, g, or t
  misc_feature (3618)..(3618): n is a, c, g, or t
  misc_feature (3624)..(3624): n is a, c, g, or t
  misc_feature (3627)..(3627): n is a, c, g, or t
  misc_feature (3633)..(3633): n is a, c, g, or t
  misc_feature (3645)..(3645): n is a, c, g, or t
  misc_feature (3648)..(3648): n is a, c, g, or t
  misc_feature (3654)..(3654): n is a, c, g, or t
  misc_feature (3657)..(3657): n is a, c, g, or t
  misc_feature (3660)..(3660): n is a, c, g, or t
  misc_feature (3663)..(3663): n is a, c, g, or t
  misc_feature (3666)..(3666): n is a, c, g, or t
  misc_feature (3669)..(3669): n is a, c, g, or t
  misc_feature (3675)..(3675): n is a, c, g, or t
  misc_feature (3678)..(3678): n is a, c, g, or t
  misc_feature (3681)..(3681): n is a, c, g, or t
  misc_feature (3684)..(3684): n is a, c, g, or t
  misc_feature (3687)..(3687): n is a, c, g, or t
  misc_feature (3690)..(3690): n is a, c, g, or t
  misc_feature (3693)..(3693): n is a, c, g, or t
  misc_feature (3696)..(3696): n is a, c, g, or t
  misc_feature (3699)..(3699): n is a, c, g, or t
  misc_feature (3702)..(3702): n is a, c, g, or t
  misc_feature (3711)..(3711): n is a, c, g, or t
  misc_feature (3714)..(3714): n is a, c, g, or t
  misc_feature (3720)..(3720): n is a, c, g, or t
  misc_feature (3723)..(3723): n is a, c, g, or t
  misc_feature (3726)..(3726): n is a, c, g, or t
  misc_feature (3729)..(3729): n is a, c, g, or t
  misc_feature (3735)..(3735): n is a, c, g, or t
  misc_feature (3738)..(3738): n is a, c, g, or t
  misc_feature (3744)..(3744): n is a, c, g, or t
  misc_feature (3747)..(3747): n is a, c, g, or t
  misc_feature (3750)..(3750): n is a, c, g, or t
  misc_feature (3753)..(3753): n is a, c, g, or t
  misc_feature (3756)..(3756): n is a, c, g, or t
  misc_feature (3762)..(3762): n is a, c, g, or t
  misc_feature (3765)..(3765): n is a, c, g, or t
  misc_feature (3768)..(3768): n is a, c, g, or t
  misc_feature (3774)..(3774): n is a, c, g, or t
  misc_feature (3777)..(3777): n is a, c, g, or t
  misc_feature (3780)..(3780): n is a, c, g, or t
  misc_feature (3783)..(3783): n is a, c, g, or t
  misc_feature (3786)..(3786): n is a, c, g, or t
  misc_feature (3789)..(3789): n is a, c, g, or t
  misc_feature (3792)..(3792): n is a, c, g, or t
  misc_feature (3795)..(3795): n is a, c, g, or t
  misc_feature (3798)..(3798): n is a, c, g, or t
  misc_feature (3801)..(3801): n is a, c, g, or t
  misc_feature (3807)..(3807): n is a, c, g, or t
  misc_feature (3810)..(3810): n is a, c, g, or t
  misc_feature (3819)..(3819): n is a, c, g, or t
  misc_feature (3822)..(3822): n is a, c, g, or t
  misc_feature (3828)..(3828): n is a, c, g, or t
  misc_feature (3837)..(3837): n is a, c, g, or t
  misc_feature (3840)..(3840): n is a, c, g, or t
  misc_feature (3846)..(3846): n is a, c, g, or t
  misc_feature (3855)..(3855): n is a, c, g, or t
  misc_feature (3858)..(3858): n is a, c, g, or t
  misc_feature (3861)..(3861): n is a, c, g, or t
  misc_feature (3864)..(3864): n is a, c, g, or t
  misc_feature (3867)..(3867): n is a, c, g, or t
  misc_feature (3870)..(3870): n is a, c, g, or t
  misc_feature (3873)..(3873): n is a, c, g, or t
  misc_feature (3876)..(3876): n is a, c, g, or t
  misc_feature (3879)..(3879): n is a, c, g, or t
  misc_feature (3882)..(3882): n is a, c, g, or t
  misc_feature (3885)..(3885): n is a, c, g, or t
  misc_feature (3888)..(3888): n is a, c, g, or t
  misc_feature (3891)..(3891): n is a, c, g, or t
  misc_feature (3897)..(3897): n is a, c, g, or t
  misc_feature (3900)..(3900): n is a, c, g, or t
  misc_feature (3903)..(3903): n is a, c, g, or t
ggngarccnggngarccnggnytngtnggnttycarggnccnccnggnmgnccnggncaygtnggncaratgggnccngtnggngcnccnggnmgnccnggnccnccnggnccnccnggnccnaarggncarcarggnaaymgnggnytnggnttytayggngtnaarggngaraarggngaygtnggncarccnggnccnaayggnathccnwsngayacnytncayccnathathgcnccnacnggngtnacnttycayccngaycartayaarggngaraarggnwsngarggngarccnggnathmgnggnathwsnytnaarggngargarggnathatgggnttyccnggnytnmgnggntayccnggnytnwsnggngaraarggnwsnccnggncaraarggnwsnmgnggnytngayggntaycarggnccngayggnccnmgnggnccnaarggngargcnggngayccnggnccnccnggnytnccngcntaywsnccncayccnwsnytngcnaarggngcnmgnggngayccnggnttyccnggngcncarggngarccnggnwsncarggngarccnggngayccnggnytnccnggnccnccnggnytnwsnathggngayggngaycarmgnmgnggnytnccnggngaratgggnccnaarggnttyathggngayccnggnathccngcnytntayggnggnccnccnggnccngayggnaarmgnggnccnccnggnccnccnggnytnccnggnccnccnggnccngayggnttyytnttyggnytnaarggngcnaarggnmgngcnggnttyccnggnytnccnggnwsnccnggngcnmgnggnccnaarggntggaarggngaygcnggngartgymgntgyacngarggngaygargcnathaarggnytnccnggnytnccnggnccnaarggnttygcnggnathaayggngarccnggnmgnaarggngaymgnggngayccnggncarcayggnytnccnggnttyccnggnytnaarggngtnccnggnaayathggngcnccnggnccnaarggngcnaarggngaywsnmgnacnathacnacnaarggngarmgnggncarccnggngtnccnggngtnccnggnatgaarggngaygayggnwsnccnggnmgngayggnytngayggnttyccnggnytnccnggnccnccnggngayggnathaarggnccnccnggngayccnggntayccnggnathccnggnacnaarggnacnccnggngaratgggnccnccnggnytnggnytnccnggnytnaarggncarmgnggnttyccnggngaygcnggnytnccnggnccnccnggnttyytnggnccnccnggnccngcnggnacnccnggncarathgaytgygayacngaygtnaarmgngcngtnggnggngaymgncargargcnathcarccnggntgyathggnggnccnaarggnytnccnggnytnccnggnccnccnggnccnacnggngcnaarggnytnmgnggnathccnggnttygcnggngcngayggnggnccnggnccnmgnggnytnccnggngaygcnggnmgngarggnttyccnggnccnccnggnttyathggnccnmgnggnwsnaarggngcngtnggnytnccnggnccngayggnwsnccnggnccnathggnytnccnggnccngayggnccnccnggngarmgnggnytnccnggngargtnytnggngcncarccnggnccnmgnggngaygcnggngtnccnggncarccnggnytnaarggnytnccnggngaymgnggnccnccnggnttymgnggnwsncarggnatgccnggnatgccnggnytnaarggncarccnggnytnccnggnccnwsnggncarccnggnytntayggnccnccnggnytncayggnttyccnggngcnccnggncargarggnccnytnggnytnccnggnathccnggnmgngarggnytnccnggngaymgnggngayccnggngayacnggngcnccnggnccngtnggnatgaarggnytnwsnggngaymgnggngaygcnggnttyacnggngarcarggncayccnggnwsnccnggnttyaarggnathgayggnatgccnggnacnccnggnytnaarggngaymgnggnwsnccnggnatggayggnttycarggnatgccnggnytnaarggnmgnccnggnttyccnggnwsnaarggngargcnggnttyttyggnathccnggnytnaarggnytngcnggngarccnggnttyaarggnwsnmgnggngayccnggnccnccnggnccnccnccngtnathytnccnggnatgaargayathaarggngaraarggngaygarggnccnatgggnytnaarggntayytnggngcnaarggnathcarggnatgccnggnathccnggnytnwsnggnathccnggnytnccnggnmgnccnggncayathaarggngtnaarggngayathggngtnccnggnathccnggnytnccnggnttyccnggngtngcnggnccnccnggnathacnggnttyccnggnttyathggnwsnmgnggngayaarggngcnccnggnmgngcnggnytntayggngarathggngcnacnggngayttyggngayathggngayacnathaayytnccnggnmgnccnggnytnaarggngarmgnggnacnacnggnathccnggnytnaarggnttyttyggngaraarggnacngarggngayathggnttyccnggnathacnggngtnacnggngtncarggnccnccnggnytnaarggncaracnggnttyccnggnytnacnggnccnccnggnwsncarggngarytnggnmgnathggnytnccnggnggnaarggngaygayggntggccnggngcnccnggnytnccnggnttyccnggnytnmgnggnathmgnggnytncayggnytnccnggnacnaarggnttyccnggnwsnccnggnwsngayathcayggngayccnggnttyccnggnccnccnggngarmgnggngayccnggngargcnaayacnytnccnggnccngtnggngtnccnggncaraarggngaycarggngcnccnggngarmgnggnccnccnggnwsnccnggnytncarggnttyccnggnathacnccnccnwsnaayathwsnggngcnccnggngayaarggngcnccnggnathttyggnytnaarggntaymgnggnccnccnggnccnccnggnwsngcngcnytnccnggnwsnaarggngayacnggnaayccnggngcnccnggnacnccnggnacnaarggntgggcnggngaywsnggnccncarggnmgnccnggngtnttyggnytnccnggngaraarggnccnmgnggngarcarggnttyatgggnaayacnggnccnacnggngcngtnggngaymgnggnccnaarggnccnaarggngayccnggnttyccnggngcnccnggnacngtnggngcnccnggnathgcnggnathccncaraarathgcngtncarccnggnacngtnggnccncarggnmgnmgnggnccnccnggngcnccnggngaratgggnccncarggnccnccnggngarccnggnttymgnggngcnccnggnaargcnggnccncarggnmgnggnggngtnwsngcngtnccnggnttymgnggngaygarggnccnathggncaycarggnccnathggncargarggngcnccnggnmgnccnggnwsnccnggnytnccnggnatgccnggnmgn

SEQ ID NO: 1102 - DNA, 4188 bp, Artificial Sequence
  hCol-CNA07 (alpha3(IV) THD)
  misc_feature (3)..(3): n is a, c, g, or t
  misc_feature (6)..(6): n is a, c, g, or t
  misc_feature (12)..(12): n is a, c, g, or t
  misc_feature (21)..(21): n is a, c, g, or t
  misc_feature (30)..(30): n is a, c, g, or t
  misc_feature (36)..(36): n is a, c, g, or t
  misc_feature (39)..(39): n is a, c, g, or t
  misc_feature (42)..(42): n is a, c, g, or t
  misc_feature (45)..(45): n is a, c, g, or t
  misc_feature (48)..(48): n is a, c, g, or t
  misc_feature (51)..(51): n is a, c, g, or t
  misc_feature (54)..(54): n is a, c, g, or t
  misc_feature (57)..(57): n is a, c, g, or t
  misc_feature (66)..(66): n is a, c, g, or t
  misc_feature (72)..(72): n is a, c, g, or t
  misc_feature (75)..(75): n is a, c, g, or t
  misc_feature (78)..(78): n is a, c, g, or t
  misc_feature (84)..(84): n is a, c, g, or t
  misc_feature (87)..(87): n is a, c, g, or t
  misc_feature (90)..(90): n is a, c, g, or t
  misc_feature (93)..(93): n is a, c, g, or t
  misc_feature (96)..(96): n is a, c, g, or t
  misc_feature (102)..(102): n is a, c, g, or t
  misc_feature (105)..(105): n is a, c, g, or t
  misc_feature (111)..(111): n is a, c, g, or t
  misc_feature (117)..(117): n is a, c, g, or t
  misc_feature (120)..(120): n is a, c, g, or t
  misc_feature (123)..(123): n is a, c, g, or t
  misc_feature (126)..(126): n is a, c, g, or t
  misc_feature (129)..(129): n is a, c, g, or t
  misc_feature (132)..(132): n is a, c, g, or t
  misc_feature (135)..(135): n is a, c, g, or t
  misc_feature (138)..(138): n is a, c, g, or t
  misc_feature (141)..(141): n is a, c, g, or t
  misc_feature (147)..(147): n is a, c, g, or t
  misc_feature (150)..(150): n is a, c, g, or t
  misc_feature (153)..(153): n is a, c, g, or t
  misc_feature (156)..(156): n is a, c, g, or t
  misc_feature (162)..(162): n is a, c, g, or t
  misc_feature (165)..(165): n is a, c, g, or t
  misc_feature (168)..(168): n is a, c, g, or t
  misc_feature (171)..(171): n is a, c, g, or t
  misc_feature (174)..(174): n is a, c, g, or t
  misc_feature (180)..(180): n is a, c, g, or t
  misc_feature (183)..(183): n is a, c, g, or t
  misc_feature (186)..(186): n is a, c, g, or t
  misc_feature (189)..(189): n is a, c, g, or t
  misc_feature (192)..(192): n is a, c, g, or t
  misc_feature (195)..(195): n is a, c, g, or t
  misc_feature (198)..(198): n is a, c, g, or t
  misc_feature (201)..(201): n is a, c, g, or t
  misc_feature (204)..(204): n is a, c, g, or t
  misc_feature (207)..(207): n is a, c, g, or t
  misc_feature (210)..(210): n is a, c, g, or t
  misc_feature (216)..(216): n is a, c, g, or t
  misc_feature (219)..(219): n is a, c, g, or t
  misc_feature (222)..(222): n is a, c, g, or t
  misc_feature (228)..(228): n is a, c, g, or t
  misc_feature (231)..(231): n is a, c, g, or t
  misc_feature (234)..(234): n is a, c, g, or t
  misc_feature (237)..(237): n is a, c, g, or t
  misc_feature (240)..(240): n is a, c, g, or t
  misc_feature (243)..(243): n is a, c, g, or t
  misc_feature (246)..(246): n is a, c, g, or t
  misc_feature (252)..(252): n is a, c, g, or t
  misc_feature (255)..(255): n is a, c, g, or t
  misc_feature (258)..(258): n is a, c, g, or t
  misc_feature (264)..(264): n is a, c, g, or t
  misc_feature (273)..(273): n is a, c, g, or t
  misc_feature (279)..(279): n is a, c, g, or t
  misc_feature (282)..(282): n is a, c, g, or t
  misc_feature (285)..(285): n is a, c, g, or t
  misc_feature (288)..(288): n is a, c, g, or t
  misc_feature (291)..(291): n is a, c, g, or t
  misc_feature (294)..(294): n is a, c, g, or t
  misc_feature (297)..(297): n is a, c, g, or t
  misc_feature (300)..(300): n is a, c, g, or t
  misc_feature (306)..(306): n is a, c, g, or t
  misc_feature (309)..(309): n is a, c, g, or t
  misc_feature (315)..(315): n is a, c, g, or t
  misc_feature (318)..(318): n is a, c, g, or t
  misc_feature (321)..(321): n is a, c, g, or t
  misc_feature (324)..(324): n is a, c, g, or t
  misc_feature (327)..(327): n is a, c, g, or t
  misc_feature (330)..(330): n is a, c, g, or t
  misc_feature (336)..(336): n is a, c, g, or t
  misc_feature (345)..(345): n is a, c, g, or t
  misc_feature (348)..(348): n is a, c, g, or t
  misc_feature (351)..(351): n is a, c, g, or t
  misc_feature (354)..(354): n is a, c, g, or t
  misc_feature (375)..(375): n is a, c, g, or t
  misc_feature (381)..(381): n is a, c, g, or t
  misc_feature (387)..(387): n is a, c, g, or t
  misc_feature (393)..(393): n is a, c, g, or t
  misc_feature (396)..(396): n is a, c, g, or t
  misc_feature (399)..(399): n is a, c, g, or t
  misc_feature (402)..(402): n is a, c, g, or t
  misc_feature (405)..(405): n is a, c, g, or t
  misc_feature (408)..(408): n is a, c, g, or t
  misc_feature (411)..(411): n is a, c, g, or t
  misc_feature (414)..(414): n is a, c, g, or t
  misc_feature (417)..(417): n is a, c, g, or t
  misc_feature (423)..(423): n is a, c, g, or t
  misc_feature (426)..(426): n is a, c, g, or t
  misc_feature (429)..(429): n is a, c, g, or t
  misc_feature (432)..(432): n is a, c, g, or t
  misc_feature (435)..(435): n is a, c, g, or t
  misc_feature (438)..(438): n is a, c, g, or t
  misc_feature (441)..(441): n is a, c, g, or t
  misc_feature (447)..(447): n is a, c, g, or t
  misc_feature (450)..(450): n is a, c, g, or t
  misc_feature (453)..(453): n is a, c, g, or t
  misc_feature (456)..(456): n is a, c, g, or t
  misc_feature (459)..(459): n is a, c, g, or t
  misc_feature (462)..(462): n is a, c, g, or t
  misc_feature (465)..(465): n is a, c, g, or t
  misc_feature (468)..(468): n is a, c, g, or t
  misc_feature (471)..(471): n is a, c, g, or t
  misc_feature (474)..(474): n is a, c, g, or t
  misc_feature (477)..(477): n is a, c, g, or t
  misc_feature (486)..(486): n is a, c, g, or t
  misc_feature (492)..(492): n is a, c, g, or t
  misc_feature (495)..(495): n is a, c, g, or t
  misc_feature (498)..(498): n is a, c, g, or t
  misc_feature (504)..(504): n is a, c, g, or t
  misc_feature (507)..(507): n is a, c, g, or t
  misc_feature (510)..(510): n is a, c, g, or t
  misc_feature (513)..(513): n is a, c, g, or t
  misc_feature (516)..(516): n is a, c, g, or t
  misc_feature (522)..(522): n is a, c, g, or t
  misc_feature (531)..(531): n is a, c, g, or t
  misc_feature (537)..(537): n is a, c, g, or t
  misc_feature (540)..(540): n is a, c, g, or t
  misc_feature (546)..(546): n is a, c, g, or t
  misc_feature (555)..(555): n is a, c, g, or t
  misc_feature (561)..(561): n is a, c, g, or t
  misc_feature (564)..(564): n is a, c, g, or t
  misc_feature (567)..(567): n is a, c, g, or t
  misc_feature (573)..(573): n is a, c, g, or t
  misc_feature (576)..(576): n is a, c, g, or t
  misc_feature (579)..(579): n is a, c, g, or t
  misc_feature (582)..(582): n is a, c, g, or t
  misc_feature (585)..(585): n is a, c, g, or t
  misc_feature (588)..(588): n is a, c, g, or t
  misc_feature (591)..(591): n is a, c, g, or t
  misc_feature (594)..(594): n is a, c, g, or t
  misc_feature (597)..(597): n is a, c, g, or t
  misc_feature (600)..(600): n is a, c, g, or t
  misc_feature (603)..(603): n is a, c, g, or t
  misc_feature (606)..(606): n is a, c, g, or t
  misc_feature (612)..(612): n is a, c, g, or t
  misc_feature (615)..(615): n is a, c, g, or t
  misc_feature (618)..(618): n is a, c, g, or t
  misc_feature (621)..(621): n is a, c, g, or t
  misc_feature (624)..(624): n is a, c, g, or t
  misc_feature (627)..(627): n is a, c, g, or t
  misc_feature (636)..(636): n is a, c, g, or t
  misc_feature (639)..(639): n is a, c, g, or t
  misc_feature (645)..(645): n is a, c, g, or t
  misc_feature (651)..(651): n is a, c, g, or t
  misc_feature (660)..(660): n is a, c, g, or t
  misc_feature (669)..(669): n is a, c, g, or t
  misc_feature (672)..(672): n is a, c, g, or t
  misc_feature (678)..(678): n is a, c, g, or t
  misc_feature (684)..(684): n is a, c, g, or t
  misc_feature (687)..(687): n is a, c, g, or t
  misc_feature (690)..(690): n is a, c, g, or t
  misc_feature (693)..(693): n is a, c, g, or t
  misc_feature (696)..(696): n is a, c, g, or t
  misc_feature (699)..(699): n is a, c, g, or t
  misc_feature (702)..(702): n is a, c, g, or t
  misc_feature (705)..(705): n is a, c, g, or t
  misc_feature (708)..(708): n is a, c, g, or t
  misc_feature (711)..(711): n is a, c, g, or t
  misc_feature (714)..(714): n is a, c, g, or t
  misc_feature (720)..(720): n is a, c, g, or t
  misc_feature (726)..(726): n is a, c, g, or t
  misc_feature (729)..(729): n is a, c, g, or t
  misc_feature (738)..(738): n is a, c, g, or t
  misc_feature (741)..(741): n is a, c, g, or t
  misc_feature (744)..(744): n is a, c, g, or t
  misc_feature (747)..(747): n is a, c, g, or t
  misc_feature (753)..(753): n is a, c, g, or t
  misc_feature (756)..(756): n is a, c, g, or t
  misc_feature (759)..(759): n is a, c, g, or t
  misc_feature (765)..(765): n is a, c, g, or t
  misc_feature (771)..(771): n is a, c, g, or t
  misc_feature (774)..(774): n is a, c, g, or t
  misc_feature (783)..(783): n is a, c, g, or t
  misc_feature (786)..(786): n is a, c, g, or t
  misc_feature (789)..(789): n is a, c, g, or t
  misc_feature (792)..(792): n is a, c, g, or t
  misc_feature (798)..(798): n is a, c, g, or t
  misc_feature (801)..(801): n is a, c, g, or t
  misc_feature (804)..(804): n is a, c, g, or t
  misc_feature (810)..(810): n is a, c, g, or t
  misc_feature (813)..(813): n is a, c, g, or t
  misc_feature (819)..(819): n is a, c, g, or t
  misc_feature (825)..(825): n is a, c, g, or t
  misc_feature (828)..(828): n is a, c, g, or t
  misc_feature (834)..(834): n is a, c, g, or t
  misc_feature (837)..(837): n is a, c, g, or t
  misc_feature (840)..(840): n is a, c, g, or t
  misc_feature (846)..(846): n is a, c, g, or t
  misc_feature (855)..(855): n is a, c, g, or t
  misc_feature (864)..(864): n is a, c, g, or t
  misc_feature (873)..(873): n is a, c, g, or t
  misc_feature (882)..(882): n is a, c, g, or t
  misc_feature (885)..(885): n is a, c, g, or t
  misc_feature (888)..(888): n is a, c, g, or t
  misc_feature (891)..(891): n is a, c, g, or t
  misc_feature (897)..(897): n is a, c, g, or t
  misc_feature (900)..(900): n is a, c, g, or t
  misc_feature (903)..(903): n is a, c, g, or t
  misc_feature (906)..(906): n is a, c, g, or t
  misc_feature (921)..(921): n is a, c, g, or t
  misc_feature (936)..(936): n is a, c, g, or t
  misc_feature (945)..(945): n is a, c, g, or t
  misc_feature (948)..(948): n is a, c, g, or t
  misc_feature (951)..(951): n is a, c, g, or t
  misc_feature (954)..(954): n is a, c, g, or t
  misc_feature (957)..(957): n is a, c, g, or t
  misc_feature (960)..(960): n is a, c, g, or t
  misc_feature (963)..(963): n is a, c, g, or t
  misc_feature (966)..(966): n is a, c, g, or t
  misc_feature (969)..(969): n is a, c, g, or t
  misc_feature (972)..(972): n is a, c, g, or t
  misc_feature (975)..(975): n is a, c, g, or t
  misc_feature (978)..(978): n is a, c, g, or t
  misc_feature (981)..(981): n is a, c, g, or t
  misc_feature (984)..(984): n is a, c, g, or t
  misc_feature (990)..(990): n is a, c, g, or t
  misc_feature (993)..(993): n is a, c, g, or t
  misc_feature (996)..(996): n is a, c, g, or t
  misc_feature (999)..(999): n is a, c, g, or t
  misc_feature (1002)..(1002): n is a, c, g, or t
  misc_feature (1005)..(1005): n is a, c, g, or t
  misc_feature (1008)..(1008): n is a, c, g, or t
  misc_feature (1011)..(1011): n is a, c, g, or t
  misc_feature (1014)..(1014): n is a, c, g, or t
  misc_feature (1017)..(1017): n is a, c, g, or t
  misc_feature (1020)..(1020): n is a, c, g, or t
  misc_feature (1023)..(1023): n is a, c, g, or t
  misc_feature (1026)..(1026): n is a, c, g, or t
  misc_feature (1029)..(1029): n is a, c, g, or t
  misc_feature (1032)..(1032): n is a, c, g, or t
  misc_feature (1035)..(1035): n is a, c, g, or t
  misc_feature (1038)..(1038): n is a, c, g, or t
  misc_feature (1041)..(1041): n is a, c, g, or t
  misc_feature (1044)..(1044): n is a, c, g, or t
  misc_feature (1047)..(1047): n is a, c, g, or t
  misc_feature (1050)..(1050): n is a, c, g, or t
  misc_feature (1053)..(1053): n is a, c, g, or t
  misc_feature (1056)..(1056): n is a, c, g, or t
  misc_feature (1059)..(1059): n is a, c, g, or t
  misc_feature (1065)..(1065): n is a, c, g, or t
  misc_feature (1068)..(1068): n is a, c, g, or t
  misc_feature (1071)..(1071): n is a, c, g, or t
  misc_feature (1077)..(1077): n is a, c, g, or t
  misc_feature (1080)..(1080): n is a, c, g, or t
  misc_feature (1086)..(1086): n is a, c, g, or t
  misc_feature (1092)..(1092): n is a, c, g, or t
  misc_feature (1095)..(1095): n is a, c, g, or t
  misc_feature (1098)..(1098): n is a, c, g, or t
  misc_feature (1101)..(1101): n is a, c, g, or t
  misc_feature (1104)..(1104): n is a, c, g, or t
  misc_feature (1113)..(1113): n is a, c, g, or t
  misc_feature (1119)..(1119): n is a, c, g, or t
  misc_feature (1122)..(1122): n is a, c, g, or t
  misc_feature (1125)..(1125): n is a, c, g, or t
  misc_feature (1128)..(1128): n is a, c, g, or t
  misc_feature (1131)..(1131): n is a, c, g, or t
  misc_feature (1134)..(1134): n is a, c, g, or t
  misc_feature (1137)..(1137): n is a, c, g, or t
  misc_feature (1143)..(1143): n is a, c, g, or t
  misc_feature (1146)..(1146): n is a, c, g, or t
  misc_feature (1149)..(1149): n is a, c, g, or t
  misc_feature (1152)..(1152): n is a, c, g, or t
  misc_feature (1155)..(1155): n is a, c, g, or t
  misc_feature (1158)..(1158): n is a, c, g, or t
  misc_feature (1161)..(1161): n is a, c, g, or t
  misc_feature (1164)..(1164): n is a, c, g, or t
  misc_feature (1167)..(1167): n is a, c, g, or t
  misc_feature (1170)..(1170): n is a, c, g, or t
  misc_feature (1173)..(1173): n is a, c, g, or t
  misc_feature (1176)..(1176): n is a, c, g, or t
  misc_feature (1179)..(1179): n is a, c, g, or t
  misc_feature (1182)..(1182): n is a, c, g, or t
  misc_feature (1185)..(1185): n is a, c, g, or t
  misc_feature (1188)..(1188): n is a, c, g, or t
  misc_feature (1191)..(1191): n is a, c, g, or t
  misc_feature (1200)..(1200): n is a, c, g, or t
  misc_feature (1206)..(1206): n is a, c, g, or t
  misc_feature (1212)..(1212): n is a, c, g, or t
  misc_feature (1215)..(1215): n is a, c, g, or t
  misc_feature (1218)..(1218): n is a, c, g, or t
  misc_feature (1221)..(1221): n is a, c, g, or t
  misc_feature (1230)..(1230): n is a, c, g, or t
  misc_feature (1233)..(1233): n is a, c, g, or t
  misc_feature (1236)..(1236): n is a, c, g, or t
  misc_feature (1239)..(1239): n is a, c, g, or t
  misc_feature (1245)..(1245): n is a, c, g, or t
  misc_feature (1248)..(1248): n is a, c, g, or t
  misc_feature (1251)..(1251): n is a, c, g, or t
  misc_feature (1254)..(1254): n is a, c, g, or t
  misc_feature (1257)..(1257): n is a, c, g, or t
  misc_feature (1263)..(1263): n is a, c, g, or t
  misc_feature (1266)..(1266): n is a, c, g, or t
  misc_feature (1269)..(1269): n is a, c, g, or t
  misc_feature (1275)..(1275): n is a, c, g, or t
  misc_feature (1278)..(1278): n is a, c, g, or t
  misc_feature (1284)..(1284): n is a, c, g, or t
  misc_feature (1290)..(1290): n is a, c, g, or t
  misc_feature (1293)..(1293): n is a, c, g, or t
  misc_feature (1296)..(1296): n is a, c, g, or t
  misc_feature (1299)..(1299): n is a, c, g, or t
  misc_feature (1305)..(1305): n is a, c, g, or t
  misc_feature (1314)..(1314): n is a, c, g, or t
  misc_feature (1323)..(1323): n is a, c, g, or t
  misc_feature (1326)..(1326): n is a, c, g, or t
  misc_feature (1329)..(1329): n is a, c, g, or t
  misc_feature (1332)..(1332): n is a, c, g, or t
  misc_feature (1335)..(1335): n is a, c, g, or t
  misc_feature (1338)..(1338): n is a, c, g, or t
  misc_feature (1341)..(1341): n is a, c, g, or t
  misc_feature (1344)..(1344): n is a, c, g, or t
  misc_feature (1347)..(1347): n is a, c, g, or t
  misc_feature (1350)..(1350): n is a, c, g, or t
  misc_feature (1353)..(1353): n is a, c, g, or t
  misc_feature (1356)..(1356): n is a, c, g, or t
  misc_feature (1362)..(1362): n is a, c, g, or t
  misc_feature (1365)..(1365): n is a, c, g, or t
  misc_feature (1371)..(1371): n is a, c, g, or t
  misc_feature (1377)..(1377): n is a, c, g, or t
  misc_feature (1380)..(1380): n is a, c, g, or t
  misc_feature (1383)..(1383): n is a, c, g, or t
  misc_feature (1389)..(1389): n is a, c, g, or t
  misc_feature (1392)..(1392): n is a, c, g, or t
  misc_feature (1395)..(1395): n is a, c, g, or t
  misc_feature (1398)..(1398): n is a, c, g, or t
  misc_feature (1401)..(1401): n is a, c, g, or t
  misc_feature (1407)..(1407): n is a, c, g, or t
  misc_feature (1410)..(1410): n is a, c, g, or t
  misc_feature (1413)..(1413): n is a, c, g, or t
  misc_feature (1416)..(1416): n is a, c, g, or t
  misc_feature (1419)..(1419): n is a, c, g, or t
  misc_feature (1422)..(1422): n is a, c, g, or t
  misc_feature (1425)..(1425): n is a, c, g, or t
  misc_feature (1431)..(1431): n is a, c, g, or t
  misc_feature (1434)..(1434): n is a, c, g, or t
  misc_feature (1437)..(1437): n is a, c, g, or t
  misc_feature (1440)..(1440): n is a, c, g, or t
  misc_feature (1443)..(1443): n is a, c, g, or t
  misc_feature (1449)..(1449): n is a, c, g, or t
  misc_feature (1452)..(1452): n is a, c, g, or t
  misc_feature (1458)..(1458): n is a, c, g, or t
  misc_feature (1461)..(1461): n is a, c, g, or t
  misc_feature (1464)..(1464): n is a, c, g, or t
  misc_feature (1470)..(1470): n is a, c, g, or t
  misc_feature (1476)..(1476): n is a, c, g, or t
  misc_feature (1479)..(1479): n is a, c, g, or t
  misc_feature (1482)..(1482): n is a, c, g, or t
  misc_feature (1488)..(1488): n is a, c, g, or t
  misc_feature (1497)..(1497): n is a, c, g, or t
  misc_feature (1503)..(1503): n is a, c, g, or t
  misc_feature (1506)..(1506): n is a, c, g, or t
  misc_feature (1512)..(1512): n is a, c, g, or t
  misc_feature (1518)..(1518): n is a, c, g, or t
  misc_feature (1524)..(1524): n is a, c, g, or t
  misc_feature (1527)..(1527): n is a, c, g, or t
  misc_feature (1530)..(1530): n is a, c, g, or t
  misc_feature (1533)..(1533): n is a, c, g, or t
  misc_feature (1536)..(1536): n is a, c, g, or t
  misc_feature (1542)..(1542): n is a, c, g, or t
  misc_feature (1545)..(1545): n is a, c, g, or t
  misc_feature (1548)..(1548): n is a, c, g, or t
  misc_feature (1551)..(1551): n is a, c, g, or t
  misc_feature (1554)..(1554): n is a, c, g, or t
  misc_feature (1560)..(1560): n is a, c, g, or t
  misc_feature (1563)..(1563): n is a, c, g, or t
  misc_feature (1566)..(1566): n is a, c, g, or t
  misc_feature (1572)..(1572): n is a, c, g, or t
  misc_feature (1575)..(1575): n is a, c, g, or t
  misc_feature (1581)..(1581): n is a, c, g, or t
  misc_feature (1587)..(1587): n is a, c, g, or t
  misc_feature (1590)..(1590): n is a, c, g, or t
  misc_feature (1593)..(1593): n is a, c, g, or t
  misc_feature (1596)..(1596): n is a, c, g, or t
  misc_feature (1599)..(1599): n is a, c, g, or t
  misc_feature (1602)..(1602): n is a, c, g, or t
  misc_feature (1608)..(1608): n is a, c, g, or t
  misc_feature (1611)..(1611): n is a, c, g, or t
  misc_feature (1614)..(1614): n is a, c, g, or t
  misc_feature (1617)..(1617): n is a, c, g, or t
  misc_feature (1620)..(1620): n is a, c, g, or t
  misc_feature (1626)..(1626): n is a, c, g, or t
  misc_feature (1632)..(1632): n is a, c, g, or t
  misc_feature (1635)..(1635): n is a, c, g, or t
  misc_feature (1638)..(1638): n is a, c, g, or t
  misc_feature (1641)..(1641): n is a, c, g, or t
  misc_feature (1644)..(1644): n is a, c, g, or t
  misc_feature (1653)..(1653): n is a, c, g, or t
  misc_feature (1662)..(1662): n is a, c, g, or t
  misc_feature (1665)..(1665): n is a, c, g, or t
  misc_feature (1668)..(1668): n is a, c, g, or t
  misc_feature (1671)..(1671): n is a, c, g, or t
  misc_feature (1677)..(1677): n is a, c, g, or t
  misc_feature (1680)..(1680): n is a, c, g, or t
  misc_feature (1683)..(1683): n is a, c, g, or t
  misc_feature (1686)..(1686): n is a, c, g, or t
  misc_feature (1689)..(1689): n is a, c, g, or t
  misc_feature (1692)..(1692): n is a, c, g, or t
  misc_feature (1695)..(1695): n is a, c, g, or t
  misc_feature (1698)..(1698): n is a, c, g, or t
  misc_feature (1701)..(1701): n is a, c, g, or t
  misc_feature (1704)..(1704): n is a, c, g, or t
  misc_feature (1707)..(1707): n is a, c, g, or t
  misc_feature (1710)..(1710): n is a, c, g, or t
  misc_feature (1713)..(1713): n is a, c, g, or t
  misc_feature (1716)..(1716): n is a, c, g, or t
  misc_feature (1719)..(1719): n is a, c, g, or t
  misc_feature (1722)..(1722): n is a, c, g, or t
  misc_feature (1725)..(1725): n is a, c, g, or t
  misc_feature (1731)..(1731): n is a, c, g, or t
  misc_feature (1734)..(1734): n is a, c, g, or t
  misc_feature (1740)..(1740): n is a, c, g, or t
  misc_feature (1746)..(1746): n is a, c, g, or t
  misc_feature (1749)..(1749): n is a, c, g, or t
  misc_feature (1752)..(1752): n is a, c, g, or t
  misc_feature (1758)..(1758): n is a, c, g, or t
  misc_feature (1761)..(1761): n is a, c, g, or t
  misc_feature (1767)..(1767): n is a, c, g, or t
  misc_feature (1770)..(1770): n is a, c, g, or t
  misc_feature (1773)..(1773): n is a, c, g, or t
  misc_feature (1776)..(1776): n is a, c, g, or t
  misc_feature (1779)..(1779): n is a, c, g, or t
  misc_feature (1782)..(1782): n is a, c, g, or t
  misc_feature (1785)..(1785): n is a, c, g, or t
  misc_feature (1788)..(1788): n is a, c, g, or t
  misc_feature (1791)..(1791): n is a, c, g, or t
  misc_feature (1794)..(1794): n is a, c, g, or t
  misc_feature (1800)..(1800): n is a, c, g, or t
  misc_feature (1803)..(1803): n is a, c, g, or t
  misc_feature (1806)..(1806): n is a, c, g, or t
  misc_feature (1809)..(1809): n is a, c, g, or t
  misc_feature (1812)..(1812): n is a, c, g, or t
  misc_feature (1818)..(1818): n is a, c, g, or t
  misc_feature (1821)..(1821): n is a, c, g, or t
  misc_feature (1824)..(1824): n is a, c, g, or t
  misc_feature (1827)..(1827): n is a, c, g, or t
  misc_feature (1830)..(1830): n is a, c, g, or t
  misc_feature (1833)..(1833): n is a, c, g, or t
  misc_feature (1836)..(1836): n is a, c, g, or t
  misc_feature (1839)..(1839): n is a, c, g, or t
  misc_feature (1842)..(1842): n is a, c, g, or t
  misc_feature (1845)..(1845): n is a, c, g, or t
  misc_feature (1848)..(1848): n is a, c, g, or t
  misc_feature (1851)..(1851): n is a, c, g, or t
  misc_feature (1854)..(1854): n is a, c, g, or t
  misc_feature (1857)..(1857): n is a, c, g, or t
  misc_feature (1860)..(1860): n is a, c, g, or t
  misc_feature (1863)..(1863): n is a, c, g, or t
  misc_feature (1866)..(1866): n is a, c, g, or t
  misc_feature (1869)..(1869): n is a, c, g, or t
  misc_feature (1875)..(1875): n is a, c, g, or t
  misc_feature (1878)..(1878): n is a, c, g, or t
  misc_feature (1881)..(1881): n is a, c, g, or t
  misc_feature (1887)..(1887): n is a, c, g, or t
  misc_feature (1890)..(1890): n is a, c, g, or t
  misc_feature (1893)..(1893): n is a, c, g, or t
  misc_feature (1896)..(1896): n is a, c, g, or t
  misc_feature (1902)..(1902): n is a, c, g, or t
  misc_feature (1905)..(1905): n is a, c, g, or t
  misc_feature (1908)..(1908): n is a, c, g, or t
  misc_feature (1911)..(1911): n is a, c, g, or t
  misc_feature (1914)..(1914): n is a, c, g, or t
  misc_feature (1923)..(1923): n is a, c, g, or t
  misc_feature (1929)..(1929): n is a, c, g, or t
  misc_feature (1932)..(1932): n is a, c, g, or t
  misc_feature (1935)..(1935): n is a, c, g, or t
  misc_feature (1938)..(1938): n is a, c, g, or t
  misc_feature (1941)..(1941): n is a, c, g, or t
  misc_feature (1944)..(1944): n is a, c, g, or t
  misc_feature (1950)..(1950): n is a, c, g, or t
  misc_feature (1956)..(1956): n is a, c, g, or t
  misc_feature (1959)..(1959): n is a, c, g, or t
  misc_feature (1965)..(1965): n is a, c, g, or t
  misc_feature (1968)..(1968): n is a, c, g, or t
  misc_feature (1974)..(1974): n is a, c, g, or t
  misc_feature (1980)..(1980): n is a, c, g, or t
  misc_feature (1983)..(1983): n is a, c, g, or t
  misc_feature (1986)..(1986): n is a, c, g, or t
  misc_feature (1989)..(1989): n is a, c, g, or t
  misc_feature (1992)..(1992): n is a, c, g, or t
  misc_feature (1995)..(1995): n is a, c, g, or t
  misc_feature (2001)..(2001): n is a, c, g, or t
  misc_feature (2010)..(2010): n is a, c, g, or t
  misc_feature (2016)..(2016): n is a, c, g, or t
  misc_feature (2019)..(2019): n is a, c, g, or t
  misc_feature (2022)..(2022): n is a, c, g, or t
  misc_feature (2028)..(2028): n is a, c, g, or t
  misc_feature (2031)..(2031): n is a, c, g, or t
  misc_feature (2034)..(2034): n is a, c, g, or t
  misc_feature (2037)..(2037): n is a, c, g, or t
  misc_feature (2043)..(2043): n is a, c, g, or t
  misc_feature (2046)..(2046): n is a, c, g, or t
  misc_feature (2055)..(2055): n is a, c, g, or t
  misc_feature (2061)..(2061): n is a, c, g, or t
  misc_feature (2064)..(2064): n is a, c, g, or t
  misc_feature (2067)..(2067): n is a, c, g, or t
  misc_feature (2070)..(2070): n is a, c, g, or t
  misc_feature (2073)..(2073): n is a, c, g, or t
  misc_feature (2079)..(2079): n is a, c, g, or t
  misc_feature (2082)..(2082): n is a, c, g, or t
  misc_feature (2085)..(2085): n is a, c, g, or t
  misc_feature (2088)..(2088): n is a, c, g, or t
  misc_feature (2091)..(2091): n is a, c, g, or t
  misc_feature (2094)..(2094): n is a, c, g, or t
  misc_feature (2100)..(2100): n is a, c, g, or t
  misc_feature (2106)..(2106): n is a, c, g, or t
  misc_feature (2109)..(2109): n is a, c, g, or t
  misc_feature (2112)..(2112): n is a, c, g, or t
  misc_feature (2115)..(2115): n is a, c, g, or t
  misc_feature (2121)..(2121): n is a, c, g, or t
  misc_feature (2124)..(2124): n is a, c, g, or t
  misc_feature (2127)..(2127): n is a, c, g, or t
  misc_feature (2130)..(2130): n is a, c, g, or t
  misc_feature (2133)..(2133): n is a, c, g, or t
  misc_feature (2136)..(2136): n is a, c, g, or t
  misc_feature (2139)..(2139): n is a, c, g, or t
  misc_feature (2142)..(2142): n is a, c, g, or t
  misc_feature (2148)..(2148): n is a, c, g, or t
  misc_feature (2151)..(2151): n is a, c, g, or t
  misc_feature (2157)..(2157): n is a, c, g, or t
  misc_feature (2160)..(2160): n is a, c, g, or t
  misc_feature (2166)..(2166): n is a, c, g, or t
  misc_feature (2169)..(2169): n is a, c, g, or t
  misc_feature (2178)..(2178): n is a, c, g, or t
  misc_feature (2187)..(2187): n is a, c, g, or t
  misc_feature (2190)..(2190): n is a, c, g, or t
  misc_feature (2193)..(2193): n is a, c, g, or t
  misc_feature (2196)..(2196): n is a, c, g, or t
  misc_feature (2199)..(2199): n is a, c, g, or t
  misc_feature (2202)..(2202): n is a, c, g, or t
  misc_feature (2205)..(2205): n is a, c, g, or t
  misc_feature (2208)..(2208): n is a, c, g, or t
  misc_feature (2211)..(2211): n is a, c, g, or t
  misc_feature (2214)..(2214): n is a, c, g, or t
  misc_feature (2217)..(2217): n is a, c, g, or t
  misc_feature (2220)..(2220): n is a, c, g, or t
  misc_feature (2223)..(2223): n is a, c, g, or t
  misc_feature (2232)..(2232): n is a, c, g, or t
  misc_feature (2235)..(2235): n is a, c, g, or t
  misc_feature (2241)..(2241): n is a, c, g, or t
  misc_feature (2244)..(2244): n is a, c, g, or t
  misc_feature (2247)..(2247): n is a, c, g, or t
  misc_feature (2250)..(2250): n is a, c, g, or t
  misc_feature (2256)..(2256): n is a, c, g, or t
  misc_feature (2259)..(2259): n is a, c, g, or t
  misc_feature (2265)..(2265): n is a, c, g, or t
  misc_feature (2268)..(2268): n is a, c, g, or t
  misc_feature (2271)..(2271): n is a, c, g, or t
  misc_feature (2274)..(2274): n is a, c, g, or t
  misc_feature (2277)..(2277): n is a, c, g, or t
  misc_feature (2286)..(2286): n is a, c, g, or t
  misc_feature (2289)..(2289): n is a, c, g, or t
  misc_feature (2292)..(2292): n is a, c, g, or t
  misc_feature (2295)..(2295): n is a, c, g, or t
  misc_feature (2298)..(2298): n is a, c, g, or t
  misc_feature (2310)..(2310): n is a, c, g, or t
  misc_feature (2313)..(2313): n is a, c, g, or t
  misc_feature (2316)..(2316): n is a, c, g, or t
  misc_feature (2319)..(2319): n is a, c, g, or t
  misc_feature (2322)..(2322): n is a, c, g, or t
  misc_feature (2328)..(2328): n is a, c, g, or t
  misc_feature (2331)..(2331): n is a, c, g, or t
  misc_feature (2334)..(2334): n is a, c, g, or t
  misc_feature (2337)..(2337): n is a, c, g, or t
  misc_feature (2340)..(2340): n is a, c, g, or t
  misc_feature (2346)..(2346): n is a, c, g, or t
  misc_feature (2349)..(2349): n is a, c, g, or t
  misc_feature (2355)..(2355): n is a, c, g, or t
  misc_feature (2364)..(2364): n is a, c, g, or t
  misc_feature (2367)..(2367): n is a, c, g, or t
  misc_feature (2370)..(2370): n is a, c, g, or t
  misc_feature (2373)..(2373): n is a, c, g, or t
  misc_feature (2379)..(2379): n is a, c, g, or t
  misc_feature (2382)..(2382): n is a, c, g, or t
  misc_feature (2385)..(2385): n is a, c, g, or t
  misc_feature (2391)..(2391): n is a, c, g, or t
  misc_feature (2397)..(2397): n is a, c, g, or t
  misc_feature (2400)..(2400): n is a, c, g, or t
  misc_feature (2406)..(2406): n is a, c, g, or t
  misc_feature (2409)..(2409): n is a, c, g, or t
  misc_feature (2412)..(2412): n is a, c, g, or t
  misc_feature (2418)..(2418): n is a, c, g, or t
  misc_feature (2421)..(2421): n is a, c, g, or t
  misc_feature (2424)..(2424): n is a, c, g, or t
  misc_feature (2430)..(2430): n is a, c, g, or t
  misc_feature (2433)..(2433): n is a, c, g, or t
  misc_feature (2439)..(2439): n is a, c, g, or t
  misc_feature (2442)..(2442): n is a, c, g, or t
  misc_feature (2445)..(2445): n is a, c, g, or t
  misc_feature (2448)..(2448): n is a, c, g, or t
  misc_feature (2451)..(2451): n is a, c, g, or t
  misc_feature (2457)..(2457): n is a, c, g, or t
  misc_feature (2460)..(2460): n is a, c, g, or t
  misc_feature (2469)..(2469): n is a, c, g, or t
  misc_feature (2478)..(2478): n is a, c, g, or t
  misc_feature (2481)..(2481): n is a, c, g, or t
  misc_feature (2484)..(2484): n is a, c, g, or t
  misc_feature (2487)..(2487): n is a, c, g, or t
  misc_feature (2493)..(2493): n is a, c, g, or t
  misc_feature (2496)..(2496): n is a, c, g, or t
  misc_feature (2502)..(2502): n is a, c, g, or t
  misc_feature (2505)..(2505): n is a, c, g, or t
  misc_feature (2511)..(2511): n is a, c, g, or t
  misc_feature (2514)..(2514): n is a, c, g, or t
  misc_feature (2520)..(2520): n is a, c, g, or t
  misc_feature (2523)..(2523): n is a, c, g, or t
  misc_feature (2526)..(2526): n is a, c, g, or t
  misc_feature (2529)..(2529): n is a, c, g, or t
  misc_feature (2532)..(2532): n is a, c, g, or t
  misc_feature (2541)..(2541): n is a, c, g, or t
  misc_feature (2544)..(2544): n is a, c, g, or t
  misc_feature (2550)..(2550): n is a, c, g, or t
  misc_feature (2559)..(2559): n is a, c, g, or t
  misc_feature (2565)..(2565): n is a, c, g, or t
  misc_feature (2568)..(2568): n is a, c, g, or t
  misc_feature (2571)..(2571): n is a, c, g, or t
  misc_feature (2577)..(2577): n is a, c, g, or t
  misc_feature (2580)..(2580): n is a, c, g, or t
  misc_feature (2583)..(2583): n is a, c, g, or t
  misc_feature (2586)..(2586): n is a, c, g, or t
  misc_feature (2589)..(2589): n is a, c, g, or t
  misc_feature (2592)..(2592): n is a, c, g, or t
  misc_feature (2595)..(2595): n is a, c, g, or t
  misc_feature (2601)..(2601): n is a, c, g, or t
  misc_feature (2604)..(2604): n is a, c, g, or t
  misc_feature (2607)..(2607): n is a, c, g, or t
  misc_feature (2610)..(2610): n is a, c, g, or t
  misc_feature (2613)..(2613): n is a, c, g, or t
  misc_feature (2619)..(2619): n is a, c, g, or t
  misc_feature (2622)..(2622): n is a, c, g, or t
  misc_feature (2625)..(2625): n is a, c, g, or t
  misc_feature (2628)..(2628): n is a, c, g, or t
  misc_feature (2631)..(2631): n is a, c, g, or t
  misc_feature (2637)..(2637): n is a, c, g, or t
  misc_feature (2640)..(2640): n is a, c, g, or t
  misc_feature (2643)..(2643): n is a, c, g, or t
  misc_feature (2649)..(2649): n is a, c, g, or t
  misc_feature (2655)..(2655): n is a, c, g, or t
  misc_feature (2658)..(2658): n is a, c, g, or t
  misc_feature (2661)..(2661): n is a, c, g, or t
  misc_feature (2664)..(2664): n is a, c, g, or t
  misc_feature (2667)..(2667): n is a, c, g, or t
  misc_feature (2670)..(2670): n is a, c, g, or t
  misc_feature (2676)..(2676): n is a, c, g, or t
  misc_feature (2685)..(2685): n is a, c, g, or t
  misc_feature (2694)..(2694): n is a, c, g, or t
  misc_feature (2700)..(2700): n is a, c, g, or t
  misc_feature (2703)..(2703): n is a, c, g, or t
  misc_feature (2706)..(2706): n is a, c, g, or t
  misc_feature (2709)..(2709): n is a, c, g, or t
  misc_feature (2718)..(2718): n is a, c, g, or t
  misc_feature (2724)..(2724): n is a, c, g, or t
  misc_feature (2730)..(2730): n is a, c, g, or t
  misc_feature (2739)..(2739): n is a, c, g, or t
  misc_feature (2745)..(2745): n is a, c, g, or t
  misc_feature (2748)..(2748): n is a, c, g, or t
  misc_feature (2751)..(2751): n is a, c, g, or t
  misc_feature (2757)..(2757): n is a, c, g, or t
  misc_feature (2763)..(2763): n is a, c, g, or t
  misc_feature (2766)..(2766): n is a, c, g, or t
  misc_feature (2772)..(2772): n is a, c, g, or t
  misc_feature (2775)..(2775): n is a, c, g, or t
  misc_feature (2784)..(2784): n is a, c, g, or t
  misc_feature (2790)..(2790): n is a, c, g, or t
  misc_feature (2793)..(2793): n is a, c, g, or t
  misc_feature (2796)..(2796): n is a, c, g, or t
  misc_feature (2799)..(2799): n is a, c, g, or t
  misc_feature (2802)..(2802): n is a, c, g, or t
  misc_feature (2808)..(2808): n is a, c, g, or t
  misc_feature (2811)..(2811): n is a, c, g, or t
  misc_feature (2814)..(2814): n is a, c, g, or t
  misc_feature (2820)..(2820): n is a, c, g, or t
  misc_feature (2823)..(2823): n is a, c, g, or t
  misc_feature (2829)..(2829): n is a, c, g, or t
  misc_feature (2832)..(2832): n is a, c, g, or t
  misc_feature (2835)..(2835): n is a, c, g, or t
  misc_feature (2838)..(2838): n is a, c, g, or t
  misc_feature (2841)..(2841): n is a, c, g, or t
  misc_feature (2844)..(2844): n is a, c, g, or t
  misc_feature (2847)..(2847): n is a, c, g, or t
  misc_feature (2850)..(2850): n is a, c, g, or t
  misc_feature (2853)..(2853): n is a, c, g, or t
  misc_feature (2856)..(2856): n is a, c, g, or t
  misc_feature (2859)..(2859): n is a, c, g, or t
  misc_feature (2862)..(2862): n is a, c, g, or t
  misc_feature (2865)..(2865): n is a, c, g, or t
  misc_feature (2871)..(2871): n is a, c, g, or t
  misc_feature (2874)..(2874): n is a, c, g, or t
  misc_feature (2877)..(2877): n is a, c, g, or t
  misc_feature (2880)..(2880): n is a, c, g, or t
  misc_feature (2883)..(2883): n is a, c, g, or t
  misc_feature (2889)..(2889): n is a, c, g, or t
  misc_feature (2892)..(2892): n is a, c, g, or t
  misc_feature (2898)..(2898): n is a, c, g, or t
  misc_feature (2901)..(2901): n is a, c, g, or t
  misc_feature (2904)..(2904): n is a, c, g, or t
  misc_feature (2907)..(2907): n is a, c, g, or t
  misc_feature (2910)..(2910): n is a, c, g, or t
  misc_feature (2916)..(2916): n is a, c, g, or t
  misc_feature (2919)..(2919): n is a, c, g, or t
  misc_feature (2922)..(2922): n is a, c, g, or t
  misc_feature (2928)..(2928): n is a, c, g, or t
  misc_feature (2937)..(2937): n is a, c, g, or t
  misc_feature (2943)..(2943): n is a, c, g, or t
  misc_feature (2946)..(2946): n is a, c, g, or t
  misc_feature (2949)..(2949): n is a, c, g, or t
  misc_feature (2955)..(2955): n is a, c, g, or t
  misc_feature (2961)..(2961): n is a, c, g, or t
  misc_feature (2964)..(2964): n is a, c, g, or t
  misc_feature (2967)..(2967): n is a, c, g, or t
  misc_feature (2970)..(2970): n is a, c, g, or t
  misc_feature (2973)..(2973): n is a, c, g, or t
  misc_feature (2979)..(2979): n is a, c, g, or t
  misc_feature (2982)..(2982): n is a, c, g, or t
  misc_feature (2985)..(2985): n is a, c, g, or t
  misc_feature (2988)..(2988): n is a, c, g, or t
  misc_feature (2991)..(2991): n is a, c, g, or t
  misc_feature (2994)..(2994): n is a, c, g, or t
  misc_feature (2997)..(2997): n is a, c, g, or t
  misc_feature (3000)..(3000): n is a, c, g, or t
  misc_feature (3003)..(3003): n is a, c, g, or t
  misc_feature (3006)..(3006): n is a, c, g, or t
  misc_feature (3009)..(3009): n is a, c, g, or t
  misc_feature (3018)..(3018): n is a, c, g, or t
  misc_feature (3021)..(3021): n is a, c, g, or t
  misc_feature (3027)..(3027): n is a, c, g, or t
  misc_feature (3036)..(3036): n is a, c, g, or t
  misc_feature (3042)..(3042): n is a, c, g, or t
  misc_feature (3045)..(3045): n is a, c, g, or t
  misc_feature (3051)..(3051): n is a, c, g, or t
  misc_feature (3057)..(3057): n is a, c, g, or t
  misc_feature (3060)..(3060): n is a, c, g, or t
  misc_feature (3063)..(3063): n is a, c, g, or t
  misc_feature (3066)..(3066): n is a, c, g, or t
  misc_feature (3069)..(3069): n is a, c, g, or t
  misc_feature (3072)..(3072): n is a, c, g, or t
  misc_feature (3075)..(3075): n is a, c, g, or t
  misc_feature (3078)..(3078): n is a, c, g, or t
  misc_feature (3081)..(3081): n is a, c, g, or t
  misc_feature (3084)..(3084): n is a, c, g, or t
  misc_feature (3087)..(3087): n is a, c, g, or t
  misc_feature (3093)..(3093): n is a, c, g, or t
  misc_feature (3096)..(3096): n is a, c, g, or t
  misc_feature (3099)..(3099): n is a, c, g, or t
  misc_feature (3102)..(3102): n is a, c, g, or t
  misc_feature (3105)..(3105): n is a, c, g, or t
  misc_feature (3114)..(3114): n is a, c, g, or t
  misc_feature (3123)..(3123): n is a, c, g, or t
  misc_feature (3132)..(3132): n is a, c, g, or t
  misc_feature (3138)..(3138): n is a, c, g, or t
  misc_feature (3141)..(3141): n is a, c, g, or t
  misc_feature (3144)..(3144): n is a, c, g, or t
  misc_feature (3147)..(3147): n is a, c, g, or t
  misc_feature (3150)..(3150): n is a, c, g, or t
  misc_feature (3156)..(3156): n is a, c, g, or t
  misc_feature (3159)..(3159): n is a, c, g, or t
  misc_feature (3162)..(3162): n is a, c, g, or t
  misc_feature (3165)..(3165): n is a, c, g, or t
  misc_feature (3168)..(3168): n is a, c, g, or t
  misc_feature (3171)..(3171): n is a, c, g, or t
  misc_feature (3177)..(3177): n is a, c, g, or t
  misc_feature (3180)..(3180): n is a, c, g, or t
  misc_feature (3183)..(3183): n is a, c, g, or t
  misc_feature (3186)..(3186): n is a, c, g, or t
  misc_feature (3189)..(3189): n is a, c, g, or t
  misc_feature (3192)..(3192): n is a, c, g, or t
  misc_feature (3195)..(3195): n is a, c, g, or t
  misc_feature (3198)..(3198): n is a, c, g, or t
  misc_feature (3201)..(3201): n is a, c, g, or t
  misc_feature (3204)..(3204): n is a, c, g, or t
  misc_feature (3207)..(3207): n is a, c, g, or t
  misc_feature (3210)..(3210): n is a, c, g, or t
  misc_feature (3213)..(3213): n is a, c, g, or t
  misc_feature (3219)..(3219): n is a, c, g, or t
  misc_feature (3222)..(3222): n is a, c, g, or t
  misc_feature (3225)..(3225): n is a, c, g, or t
  misc_feature (3231)..(3231): n is a, c, g, or t
  misc_feature (3237)..(3237): n is a, c, g, or t
  misc_feature (3240)..(3240): n is a, c, g, or t
  misc_feature (3249)..(3249): n is a, c, g, or t
  misc_feature (3258)..(3258): n is a, c, g, or t
  misc_feature (3261)..(3261): n is a, c, g, or t
  misc_feature (3264)..(3264): n is a, c, g, or t
  misc_feature (3267)..(3267): n is a, c, g, or t
  misc_feature (3270)..(3270): n is a, c, g, or t
  misc_feature (3273)..(3273): n is a, c, g, or t
  misc_feature (3276)..(3276): n is a, c, g, or t
  misc_feature (3282)..(3282): n is a, c, g, or t
  misc_feature (3285)..(3285): n is a, c, g, or t
  misc_feature (3288)..(3288): n is a, c, g, or t
  misc_feature (3291)..(3291): n is a, c, g, or t
  misc_feature (3294)..(3294): n is a, c, g, or t
  misc_feature (3297)..(3297): n is a, c, g, or t
  misc_feature (3300)..(3300): n is a, c, g, or t
  misc_feature (3303)..(3303): n is a, c, g, or t
  misc_feature (3309)..(3309): n is a, c, g, or t
  misc_feature (3312)..(3312): n is a, c, g, or t
  misc_feature (3315)..(3315): n is a, c, g, or t
  misc_feature (3318)..(3318): n is a, c, g, or t
  misc_feature (3321)..(3321): n is a, c, g, or t
  misc_feature (3324)..(3324): n is a, c, g, or t
  misc_feature (3330)..(3330): n is a, c, g, or t
  misc_feature (3336)..(3336): n is a, c, g, or t
  misc_feature (3339)..(3339): n is a, c, g, or t
  misc_feature (3348)..(3348): n is a, c, g, or t
  misc_feature (3351)..(3351): n is a, c, g, or t
  misc_feature (3357)..(3357): n is a, c, g, or t
  misc_feature (3363)..(3363): n is a, c, g, or t
  misc_feature (3366)..(3366): n is a, c, g, or t
  misc_feature (3369)..(3369): n is a, c, g, or t
  misc_feature (3372)..(3372): n is a, c, g, or t
  misc_feature (3375)..(3375): n is a, c, g, or t
  misc_feature (3384)..(3384): n is a, c, g, or t
  misc_feature (3390)..(3390): n is a, c, g, or t
  misc_feature (3393)..(3393): n is a, c, g, or t
  misc_feature (3396)..(3396): n is a, c, g, or t
  misc_feature (3399)..(3399): n is a, c, g, or t
  misc_feature (3402)..(3402): n is a, c, g, or t
  misc_feature (3405)..(3405): n is a, c, g, or t
  misc_feature (3408)..(3408): n is a, c, g, or t
  misc_feature (3411)..(3411): n is a, c, g, or t
  misc_feature (3414)..(3414): n is a, c, g, or t
  misc_feature (3417)..(3417): n is a, c, g, or t
  misc_feature (3420)..(3420): n is a, c, g, or t
  misc_feature (3423)..(3423): n is a, c, g, or t
  misc_feature (3429)..(3429): n is a, c, g, or t
  misc_feature (3432)..(3432): n is a, c, g, or t
  misc_feature (3435)..(3435): n is a, c, g, or t
  misc_feature (3441)..(3441): n is a, c, g, or t
  misc_feature (3444)..(3444): n is a, c, g, or t
  misc_feature (3450)..(3450): n is a, c, g, or t
  misc_feature (3456)..(3456): n is a, c, g, or t
  misc_feature (3459)..(3459): n is a, c, g, or t
  misc_feature (3462)..(3462): n is a, c, g, or t
  misc_feature (3465)..(3465): n is a, c, g, or t
  misc_feature (3468)..(3468): n is a, c, g, or t
  misc_feature (3474)..(3474): n is a, c, g, or t
  misc_feature (3477)..(3477): n is a, c, g, or t
  misc_feature (3480)..(3480): n is a, c, g, or t
  misc_feature (3483)..(3483): n is a, c, g, or t
  misc_feature (3486)..(3486): n is a, c, g, or t
  misc_feature (3489)..(3489): n is a, c, g, or t
  misc_feature (3495)..(3495): n is a, c, g, or t
  misc_feature (3498)..(3498): n is a, c, g, or t
  misc_feature (3504)..(3504): n is a, c, g, or t
  misc_feature (3510)..(3510): n is a, c, g, or t
  misc_feature (3513)..(3513): n is a, c, g, or t
  misc_feature (3516)..(3516): n is a, c, g, or t
  misc_feature (3519)..(3519): n is a, c, g, or t
  misc_feature (3522)..(3522): n is a, c, g, or t
  misc_feature (3525)..(3525): n is a, c, g, or t
  misc_feature (3528)..(3528): n is a, c, g, or t
  misc_feature (3531)..(3531): n is a, c, g, or t
  misc_feature (3540)..(3540): n is a, c, g, or t
  misc_feature (3546)..(3546): n is a, c, g, or t
  misc_feature (3549)..(3549): n is a, c, g, or t
  misc_feature (3552)..(3552): n is a, c, g, or t
  misc_feature (3555)..(3555): n is a, c, g, or t
  misc_feature (3558)..(3558): n is a, c, g, or t
  misc_feature (3561)..(3561): n is a, c, g, or t
  misc_feature (3564)..(3564): n is a, c, g, or t
  misc_feature (3567)..(3567): n is a, c, g, or t
  misc_feature (3570)..(3570): n is a, c, g, or t
  misc_feature (3579)..(3579): n is a, c, g, or t
  misc_feature (3582)..(3582): n is a, c, g, or t
  misc_feature (3588)..(3588): n is a, c, g, or t
  misc_feature (3591)..(3591): n is a, c, g, or t
  misc_feature (3597)..(3597): n is a, c, g, or t
  misc_feature (3600)..(3600): n is a, c, g, or t
  misc_feature (3603)..(3603): n is a, c, g, or t
  misc_feature (3606)..(3606): n is a, c, g, or t
  misc_feature (3609)..(3609): n is a, c, g, or t
  misc_feature (3612)..(3612): n is a, c, g, or t
  misc_feature (3615)..(3615): n is a, c, g, or t
  misc_feature (3618)..(3618): n is a, c, g, or t
  misc_feature (3621)..(3621): n is a, c, g, or t
  misc_feature (3624)..(3624): n is a, c, g, or t
  misc_feature (3627)..(3627): n is a, c, g, or t
  misc_feature (3630)..(3630): n is a, c, g, or t
  misc_feature (3633)..(3633): n is a, c, g, or t
  misc_feature (3636)..(3636): n is a, c, g, or t
  misc_feature (3639)..(3639): n is a, c, g, or t
  misc_feature (3642)..(3642): n is a, c, g, or t
  misc_feature (3645)..(3645): n is a, c, g, or t
  misc_feature (3648)..(3648): n is a, c, g, or t
  misc_feature (3651)..(3651): n is a, c, g, or t
  misc_feature (3654)..(3654): n is a, c, g, or t
  misc_feature (3657)..(3657): n is a, c, g, or t
  misc_feature (3663)..(3663): n is a, c, g, or t
  misc_feature (3669)..(3669): n is a, c, g, or t
  misc_feature (3678)..(3678): n is a, c, g, or t
  misc_feature (3687)..(3687): n is a, c, g, or t
  misc_feature (3690)..(3690): n is a, c, g, or t
  misc_feature (3696)..(3696): n is a, c, g, or t
  misc_feature (3702)..(3702): n is a, c, g, or t
  misc_feature (3705)..(3705): n is a, c, g, or t
  misc_feature (3708)..(3708): n is a, c, g, or t
  misc_feature (3714)..(3714): n is a, c, g, or t
  misc_feature (3717)..(3717): n is a, c, g, or t
  misc_feature (3720)..(3720): n is a, c, g, or t
  misc_feature (3723)..(3723): n is a, c, g, or t
  misc_feature (3726)..(3726): n is a, c, g, or t
  misc_feature (3729)..(3729): n is a, c, g, or t
  misc_feature (3732)..(3732): n is a, c, g, or t
  misc_feature (3741)..(3741): n is a, c, g, or t
  misc_feature (3744)..(3744): n is a, c, g, or t
  misc_feature (3747)..(3747): n is a, c, g, or t
  misc_feature (3750)..(3750): n is a, c, g, or t
  misc_feature (3753)..(3753): n is a, c, g, or t
  misc_feature (3756)..(3756): n is a, c, g, or t
  misc_feature (3759)..(3759): n is a, c, g, or t
  misc_feature (3762)..(3762): n is a, c, g, or t
  misc_feature (3765)..(3765): n is a, c, g, or t
  misc_feature (3768)..(3768): n is a, c, g, or t
  misc_feature (3771)..(3771): n is a, c, g, or t
  misc_feature (3774)..(3774): n is a, c, g, or t
  misc_feature (3777)..(3777): n is a, c, g, or t
  misc_feature (3780)..(3780): n is a, c, g, or t
  misc_feature (3783)..(3783): n is a, c, g, or t
  misc_feature (3786)..(3786): n is a, c, g, or t
  misc_feature (3789)..(3789): n is a, c, g, or t
  misc_feature (3792)..(3792): n is a, c, g, or t
  misc_feature (3795)..(3795): n is a, c, g, or t
  misc_feature (3801)..(3801): n is a, c, g, or t
  misc_feature (3804)..(3804): n is a, c, g, or t
  misc_feature (3813)..(3813): n is a, c, g, or t
  misc_feature (3819)..(3819): n is a, c, g, or t
  misc_feature (3822)..(3822): n is a, c, g, or t
  misc_feature (3825)..(3825): n is a, c, g, or t
  misc_feature (3831)..(3831): n is a, c, g, or t
  misc_feature (3840)..(3840): n is a, c, g, or t
  misc_feature (3846)..(3846): n is a, c, g, or t
  misc_feature (3849)..(3849): n is a, c, g, or t
  misc_feature (3855)..(3855): n is a, c, g, or t
  misc_feature (3858)..(3858): n is a, c, g, or t
  misc_feature (3861)..(3861): n is a, c, g, or t
  misc_feature (3867)..(3867): n is a, c, g, or t
  misc_feature (3870)..(3870): n is a, c, g, or t
  misc_feature (3873)..(3873): n is a, c, g, or t
  misc_feature (3876)..(3876): n is a, c, g, or t
  misc_feature (3879)..(3879): n is a, c, g, or t
  misc_feature (3885)..(3885): n is a, c, g, or t
  misc_feature (3888)..(3888): n is a, c, g, or t
  misc_feature (3894)..(3894): n is a, c, g, or t
  misc_feature (3897)..(3897): n is a, c, g, or t
  misc_feature (3900)..(3900): n is a, c, g, or t
  misc_feature (3903)..(3903): n is a, c, g, or t
  misc_feature (3906)..(3906): n is a, c, g, or t
  misc_feature (3909)..(3909): n is a, c, g, or t
  misc_feature (3912)..(3912): n is a, c, g, or t
  misc_feature (3918)..(3918): n is a, c, g, or t
  misc_feature (3921)..(3921): n is a, c, g, or t
  misc_feature (3924)..(3924): n is a, c, g, or t
  misc_feature (3927)..(3927): n is a, c, g, or t
  misc_feature (3939)..(3939): n is a, c, g, or t
  misc_feature (3942)..(3942): n is a, c, g, or t
  misc_feature (3945)..(3945): n is a, c, g, or t
  misc_feature (3948)..(3948): n is a, c, g, or t
  misc_feature (3951)..(3951): n is a, c, g, or t
  misc_feature (3954)..(3954): n is a, c, g, or t
  misc_feature (3957)..(3957): n is a, c, g, or t
  misc_feature (3960)..(3960): n is a, c, g, or t
  misc_feature (3963)..(3963): n is a, c, g, or t
  misc_feature (3966)..(3966): n is a, c, g, or t
  misc_feature (3969)..(3969): n is a, c, g, or t
  misc_feature (3972)..(3972): n is a, c, g, or t
  misc_feature (3975)..(3975): n is a, c, g, or t
  misc_feature (3981)..(3981): n is a, c, g, or t
  misc_feature (3984)..(3984): n is a, c, g, or t
  misc_feature (3993)..(3993): n is a, c, g, or t
  misc_feature (3999)..(3999): n is a, c, g, or t
  misc_feature (4002)..(4002): n is a, c, g, or t
  misc_feature (4005)..(4005): n is a, c, g, or t
  misc_feature (4008)..(4008): n is a, c, g, or t
  misc_feature (4011)..(4011): n is a, c, g, or t
  misc_feature (4014)..(4014): n is a, c, g, or t
  misc_feature (4017)..(4017): n is a, c, g, or t
  misc_feature (4020)..(4020): n is a, c, g, or t
  misc_feature (4026)..(4026): n is a, c, g, or t
  misc_feature (4029)..(4029): n is a, c, g, or t
  misc_feature (4032)..(4032): n is a, c, g, or t
  misc_feature (4038)..(4038): n is a, c, g, or t
  misc_feature (4041)..(4041): n is a, c, g, or t
  misc_feature (4044)..(4044): n is a, c, g, or t
  misc_feature (4047)..(4047): n is a, c, g, or t
  misc_feature (4053)..(4053): n is a, c, g, or t
  misc_feature (4056)..(4056): n is a, c, g, or t
  misc_feature (4065)..(4065): n is a, c, g, or t
  misc_feature (4071)..(4071): n is a, c, g, or t
  misc_feature (4074)..(4074): n is a, c, g, or t
  misc_feature (4077)..(4077): n is a, c, g, or t
  misc_feature (4080)..(4080): n is a, c, g, or t
  misc_feature (4083)..(4083): n is a, c, g, or t
  misc_feature (4086)..(4086): n is a, c, g, or t
  misc_feature (4089)..(4089): n is a, c, g, or t
  misc_feature (4092)..(4092): n is a, c, g, or t
  misc_feature (4101)..(4101): n is a, c, g, or t
  misc_feature (4110)..(4110): n is a, c, g, or t
  misc_feature (4113)..(4113): n is a, c, g, or t
  misc_feature (4119)..(4119): n is a, c, g, or t
  misc_feature (4125)..(4125): n is a, c, g, or t
  misc_feature (4128)..(4128): n is a, c, g, or t
  misc_feature (4131)..(4131): n is a, c, g, or t
  misc_feature (4134)..(4134): n is a, c, g, or t
  misc_feature (4137)..(4137): n is a, c, g, or t
  misc_feature (4140)..(4140): n is a, c, g, or t
  misc_feature (4146)..(4146): n is a, c, g, or t
  misc_feature (4149)..(4149): n is a, c, g, or t
  misc_feature (4152)..(4152): n is a, c, g, or t
  misc_feature (4155)..(4155): n is a, c, g, or t
  misc_feature (4158)..(4158): n is a, c, g, or t
  misc_feature (4164)..(4164): n is a, c, g, or t
  misc_feature (4170)..(4170): n is a, c, g, or t
  misc_feature (4173)..(4173): n is a, c, g, or t
  misc_feature (4179)..(4179): n is a, c, g, or t
  misc_feature (4182)..(4182): n is a, c, g, or t
  misc_feature (4185)..(4185): n is a, c, g, or t
  misc_feature (4188)..(4188): n is a, c, g, or t
ggngcnaarggngaraarggngaraarggnttyccnggnccnccnggnwsnccnggncaraarggnttyacnggnccngarggnytnccnggnccncarggnccnaarggnttyccnggnytnccnggnytnacnggnwsnaarggngtnmgnggnathwsnggnytnccnggnttywsnggnwsnccnggnytnccnggnacnccnggnaayacnggnccntayggnytngtnggngtnccnggntgywsnggnwsnaarggngarcarggnttyccnggnytnccnggnacnytnggntayccnggnathccnggngcngcnggnytnaarggncaraarggngcnccngcnaargargargayathgarytngaygcnaarggngayccnggnytnccnggngcnccnggnccncarggnytnccnggnccnccnggnttyccnggnccngtnggnccnccnggnccnccnggnttyttyggnttyccnggngcnatgggnccnmgnggnccnaarggncayatgggngarmgngtnathggncayaarggngarmgnggngtnaarggnytnacnggnccnccnggnccnccnggnacngtnathgtnacnytnacnggnccngayaaymgnacngayytnaarggngaraarggngayaarggngcnatgggngarccnggnccnccnggnccnwsnggnytnccnggngarwsntayggnwsngaraarggngcnccnggngayccnggnytncarggnaarccnggnaargayggngtnccnggnttyccnggnwsngarggngtnaarggnaaymgnggnttyccnggnytnatgggngargayggnathaarggncaraarggngayathggnccnccnggnttymgnggnccnacngartaytaygayacntaycargaraarggngaygarggnacnccnggnccnccnggnccnmgnggngcnmgnggnccncarggnccnwsnggnccnccnggngtnccnggnwsnccnggnwsnwsnmgnccnggnytnmgnggngcnccnggntggccnggnytnaarggnwsnaarggngarmgnggnmgnccnggnaargaygcnatgggnacnccnggnwsnccnggntgygcnggnwsnccnggnytnccnggnwsnccnggnccnccnggnccnccnggngayathgtnttymgnaarggnccnccnggngaycayggnytnccnggntayytnggnwsnccnggnathccnggngtngayggnccnaarggngarccnggnytnytntgyacncartgyccntayathccnggnccnccnggnytnccnggnytnccnggnytncayggngtnaarggnathccnggnmgncarggngcngcnggnytnaarggnwsnccnggnwsnccnggnaayacnggnytnccnggnttyccnggnttyccnggngcncarggngayccnggnytnaarggngaraarggngaracnytncarccngarggncargtnggngtnccnggngayccnggnytnmgnggncarccnggnmgnaarggnytngayggnathccnggnacnccnggngtnaarggnytnccnggnccnaarggngarytngcnytnwsnggngaraarggngaycarggnccnccnggngayccnggnwsnccnggnwsnccnggnccngcnggnccngcnggnccnccnggntayggnccncarggngarccnggnytncarggnacncarggngtnccnggngcnccnggnccnccnggngargcnggnccnmgnggngarytnwsngtnwsnacnccngtnccnggnccnccnggnccnccnggnccnccnggncayccnggnccncarggnccnccnggnathccnggnwsnytnggnaartgyggngayccnggnytnccnggnccngayggngarccnggnathccnggnathggnttyccnggnccnccnggnccnaarggngaycarggnttyccnggnacnaarggnwsnytnggntgyccnggnaaratgggngarccnggnytnccnggnaarccnggnytnccnggngcnaarggngarccngcngtngcnatgccnggnggnccnggnacnccnggnttyccnggngarmgnggnaaywsnggngarcayggngarathggnytnccnggnytnccnggnytnccnggnacnccnggnaaygarggnytngayggnccnmgnggngayccnggncarccnggnccnccnggngarcarggnccnccnggnmgntgyathgarggnccnmgnggngcncarggnytnccnggnytnaayggnytnaarggncarcarggnmgnmgnggnaaracnggnccnaarggngayccnggnathccnggnytngaymgnwsnggnttyccnggngaracnggnwsnccnggnathccnggncaycarggngaratgggnccnytnggncarmgnggntayccnggnaayccnggnathytnggnccnccnggngargayggngtnathggnatgatgggnttyccnggngcnathggnccnccnggnccnccnggnaayccnggnacnccnggncarmgnggnwsnccnggnathccnggngtnaarggncarmgnggnacnccnggngcnaarggngarcarggngayaarggnaayccnggnccnwsngarathwsncaygtnathggngayaarggngarccnggnytnaarggnttygcnggnaayccnggngaraarggnaaymgnggngtnccnggnatgccnggnytnaarggnytnaarggnytnccnggnccngcnggnccnccnggnccnmgnggngayytnggnwsnacnggnaayccnggngarccnggnytnmgnggnathccnggnwsnatgggnaayatgggnatgccnggnwsnaarggnaarmgnggnacnytnggnttyccnggnmgngcnggnmgnccnggnytnccnggnathcayggnytncarggngayaarggngarccnggntaywsngarggnacnmgnccnggnccnccnggnccnacnggngayccnggnytnccnggngayatgggnaaraarggngaratgggncarccnggnccnccnggncayytnggnccngcnggnccngarggngcnccnggnwsnccnggnwsnccnggnytnccnggnaarccnggnccncayggngayytnggnttyaarggnathaarggnytnytnggnccnccnggnathmgnggnccnccnggnytnccnggnttyccnggnwsnccnggnccnatgggnathmgnggngaycarggnmgngayggnathccnggnccngcnggngaraarggngaracnggnytnytnmgngcnccnccnggnccnmgnggnaayccnggngcncarggngcnaarggngaymgnggngcnccnggnttyccnggnytnccnggnmgnaarggngcnatgggngaygcnggnccnmgnggnccnacnggnathgarggnttyccnggnccnccnggnytnccnggngcnathathccnggncaracnggnaaymgnggnccnccnggnwsnmgnggnwsnccnggngcnccnggnccnccnggnccnccnggnwsncaygtnathggnathaarggngayaarggnwsnatgggncayccnggnccnaarggnccnccnggnacngcnggngayatgggnccnccnggnmgnytnggngcnccnggnacnccnggnytnccnggnccnmgnggngayccnggnttycarggnttyccnggngtnaarggngaraarggnaayccnggnttyytnggnwsnathggnccnccnggnccnathggnccnaarggnccnccnggngtnmgnggngayccnggnacnytnaarathathwsnytnccnggnwsnccnggnccnccnggnacnccnggngarccnggnatgcarggngarccnggnccnccnggnccnccnggnaayytnggnccntgyggnccnmgnggnaarccnggnaargayggnaarccnggnacnccnggnccngcnggngaraarggnaayaarggnwsnaarggngarccnggnccngcnggnwsngayggnytnccnggnytnaarggnaarmgnggngaywsnggnwsnccn

SEQ ID NO: 1103 - DNA, 4185 bp, Artificial Sequence
  hCol-CNA08 (alpha4(IV) THD)
  misc_feature (3)..(3): n is a, c, g, or t
  misc_feature (6)..(6): n is a, c, g, or t
  misc_feature (9)..(9): n is a, c, g, or t
  misc_feature (12)..(12): n is a, c, g, or t
  misc_feature (15)..(15): n is a, c, g, or t
  misc_feature (18)..(18): n is a, c, g, or t
  misc_feature (21)..(21): n is a, c, g, or t
  misc_feature (24)..(24): n is a, c, g, or t
  misc_feature (30)..(30): n is a, c, g, or t
  misc_feature (33)..(33): n is a, c, g, or t
  misc_feature (39)..(39): n is a, c, g, or t
  misc_feature (42)..(42): n is a, c, g, or t
  misc_feature (45)..(45): n is a, c, g, or t
  misc_feature (48)..(48): n is a, c, g, or t
  misc_feature (51)..(51): n is a, c, g, or t
  misc_feature (54)..(54): n is a, c, g, or t
  misc_feature (57)..(57): n is a, c, g, or t
  misc_feature (60)..(60): n is a, c, g, or t
  misc_feature (66)..(66): n is a, c, g, or t
  misc_feature (69)..(69): n is a, c, g, or t
  misc_feature (72)..(72): n is a, c, g, or t
  misc_feature (75)..(75): n is a, c, g, or t
  misc_feature (84)..(84): n is a, c, g, or t
  misc_feature (90)..(90): n is a, c, g, or t
  misc_feature (93)..(93): n is a, c, g, or t
  misc_feature (99)..(99): n is a, c, g, or t
  misc_feature (102)..(102): n is a, c, g, or t
  misc_feature (105)..(105): n is a, c, g, or t
  misc_feature (108)..(108): n is a, c, g, or t
  misc_feature (111)..(111): n is a, c, g, or t
  misc_feature (114)..(114): n is a, c, g, or t
  misc_feature (117)..(117): n is a, c, g, or t
  misc_feature (120)..(120): n is a, c, g, or t
  misc_feature (129)..(129): n is a, c, g, or t
  misc_feature (138)..(138): n is a, c, g, or t
  misc_feature (141)..(141): n is a, c, g, or t
  misc_feature (144)..(144): n is a, c, g, or t
  misc_feature (147)..(147): n is a, c, g, or t
  misc_feature (150)..(150): n is a, c, g, or t
  misc_feature (153)..(153): n is a, c, g, or t
  misc_feature (156)..(156): n is a, c, g, or t
  misc_feature (162)..(162): n is a, c, g, or t
  misc_feature (165)..(165): n is a, c, g, or t
  misc_feature (168)..(168): n is a, c, g, or t
  misc_feature (174)..(174): n is a, c, g, or t
  misc_feature (180)..(180): n is a, c, g, or t
  misc_feature (183)..(183): n is a, c, g, or t
  misc_feature (189)..(189): n is a, c, g, or t
  misc_feature (192)..(192): n is a, c, g, or t
  misc_feature (195)..(195): n is a, c, g, or t
  misc_feature (198)..(198): n is a, c, g, or t
  misc_feature (201)..(201): n is a, c, g, or t
  misc_feature (204)..(204): n is a, c, g, or t
  misc_feature (207)..(207): n is a, c, g, or t
  misc_feature (210)..(210): n is a, c, g, or t
  misc_feature (216)..(216): n is a, c, g, or t
  misc_feature (219)..(219): n is a, c, g, or t
  misc_feature (225)..(225): n is a, c, g, or t
  misc_feature (228)..(228): n is a, c, g, or t
  misc_feature (237)..(237): n is a, c, g, or t
  misc_feature (240)..(240): n is a, c, g, or t
  misc_feature (243)..(243): n is a, c, g, or t
  misc_feature (246)..(246): n is a, c, g, or t
  misc_feature (252)..(252): n is a, c, g, or t
  misc_feature (255)..(255): n is a, c, g, or t
  misc_feature (261)..(261): n is a, c, g, or t
  misc_feature (264)..(264): n is a, c, g, or t
  misc_feature (267)..(267): n is a, c, g, or t
  misc_feature (270)..(270): n is a, c, g, or t
  misc_feature (273)..(273): n is a, c, g, or t
  misc_feature (276)..(276): n is a, c, g, or t
  misc_feature (279)..(279): n is a, c, g, or t
  misc_feature (282)..(282): n is a, c, g, or t
  misc_feature (285)..(285): n is a, c, g, or t
  misc_feature (288)..(288): n is a, c, g, or t
  misc_feature (291)..(291): n is a, c, g, or t
  misc_feature (294)..(294): n is a, c, g, or t
  misc_feature (297)..(297): n is a, c, g, or t
  misc_feature (300)..(300): n is a, c, g, or t
  misc_feature (306)..(306): n is a, c, g, or t
  misc_feature (309)..(309): n is a, c, g, or t
  misc_feature (318)..(318): n is a, c, g, or t
  misc_feature (327)..(327): n is a, c, g, or t
  misc_feature (333)..(333): n is a, c, g, or t
  misc_feature (336)..(336): n is a, c, g, or t
  misc_feature (345)..(345): n is a, c, g, or t
  misc_feature (348)..(348): n is a, c, g, or t
  misc_feature (351)..(351): n is a, c, g, or t
  misc_feature (354)..(354): n is a, c, g, or t
  misc_feature (360)..(360): n is a, c, g, or t
  misc_feature (369)..(369): n is a, c, g, or t
  misc_feature (375)..(375): n is a, c, g, or t
  misc_feature (378)..(378): n is a, c, g, or t
  misc_feature (384)..(384): n is a, c, g, or t
  misc_feature (387)..(387): n is a, c, g, or t
  misc_feature (390)..(390): n is a, c, g, or t
  misc_feature (393)..(393): n is a, c, g, or t
  misc_feature (396)..(396): n is a, c, g, or t
  misc_feature (399)..(399): n is a, c, g, or t
  misc_feature (402)..(402): n is a, c, g, or t
  misc_feature (405)..(405): n is a, c, g, or t
  misc_feature (408)..(408): n is a, c, g, or t
  misc_feature (414)..(414): n is a, c, g, or t
  misc_feature (417)..(417): n is a, c, g, or t
  misc_feature (420)..(420): n is a, c, g, or t
  misc_feature (423)..(423): n is a, c, g, or t
  misc_feature (426)..(426): n is a, c, g, or t
  misc_feature (429)..(429): n is a, c, g, or t
  misc_feature (432)..(432): n is a, c, g, or t
  misc_feature (435)..(435): n is a, c, g, or t
  misc_feature (438)..(438): n is a, c, g, or t
  misc_feature (441)..(441): n is a, c, g, or t
  misc_feature (447)..(447): n is a, c, g, or t
  misc_feature (450)..(450): n is a, c, g, or t
  misc_feature (456)..(456): n is a, c, g, or t
  misc_feature (459)..(459): n is a, c, g, or t
  misc_feature (462)..(462): n is a, c, g, or t
  misc_feature (465)..(465): n is a, c, g, or t
  misc_feature (468)..(468): n is a, c, g, or t
  misc_feature (471)..(471): n is a, c, g, or t
  misc_feature (474)..(474): n is a, c, g, or t
  misc_feature (477)..(477): n is a, c, g, or t
  misc_feature (483)..(483): n is a, c, g, or t
  misc_feature (486)..(486): n is a, c, g, or t
  misc_feature (489)..(489): n is a, c, g, or t
  misc_feature (492)..(492): n is a, c, g, or t
  misc_feature (495)..(495): n is a, c, g, or t
  misc_feature (498)..(498): n is a, c, g, or t
  misc_feature (504)..(504): n is a, c, g, or t
  misc_feature (510)..(510): n is a, c, g, or t
  misc_feature (513)..(513): n is a, c, g, or t
  misc_feature (516)..(516): n is a, c, g, or t
  misc_feature (519)..(519): n is a, c, g, or t
  misc_feature (522)..(522): n is a, c, g, or t
  misc_feature (528)..(528): n is a, c, g, or t
  misc_feature (537)..(537): n is a, c, g, or t
  misc_feature (543)..(543): n is a, c, g, or t
  misc_feature (546)..(546): n is a, c, g, or t
  misc_feature (552)..(552): n is a, c, g, or t
  misc_feature (555)..(555): n is a, c, g, or t
  misc_feature (564)..(564): n is a, c, g, or t
  misc_feature (567)..(567): n is a, c, g, or t
  misc_feature (570)..(570): n is a, c, g, or t
  misc_feature (573)..(573): n is a, c, g, or t
  misc_feature (576)..(576): n is a, c, g, or t
  misc_feature (579)..(579): n is a, c, g, or t
  misc_feature (582)..(582): n is a, c, g, or t
  misc_feature (585)..(585): n is a, c, g, or t
  misc_feature (588)..(588): n is a, c, g, or t
  misc_feature (594)..(594): n is a, c, g, or t
  misc_feature (597)..(597): n is a, c, g, or t
  misc_feature (609)..(609): n is a, c, g, or t
  misc_feature (618)..(618): n is a, c, g, or t
  misc_feature (627)..(627): n is a, c, g, or t
  misc_feature (636)..(636): n is a, c, g, or t
  misc_feature (642)..(642): n is a, c, g, or t
  misc_feature (645)..(645): n is a, c, g, or t
  misc_feature (651)..(651): n is a, c, g, or t
  misc_feature (654)..(654): n is a, c, g, or t
  misc_feature (657)..(657): n is a, c, g, or t
  misc_feature (660)..(660): n is a, c, g, or t
  misc_feature (663)..(663): n is a, c, g, or t
  misc_feature (666)..(666): n is a, c, g, or t
  misc_feature (669)..(669): n is a, c, g, or t
  misc_feature (672)..(672): n is a, c, g, or t
  misc_feature (675)..(675): n is a, c, g, or t
  misc_feature (681)..(681): n is a, c, g, or t
  misc_feature (687)..(687): n is a, c, g, or t
  misc_feature (690)..(690): n is a, c, g, or t
  misc_feature (696)..(696): n is a, c, g, or t
  misc_feature (699)..(699): n is a, c, g, or t
  misc_feature (705)..(705): n is a, c, g, or t
  misc_feature (714)..(714): n is a, c, g, or t
  misc_feature (720)..(720): n is a, c, g, or t
  misc_feature (723)..(723): n is a, c, g, or t
  misc_feature (729)..(729): n is a, c, g, or t
  misc_feature (732)..(732): n is a, c, g, or t
  misc_feature (735)..(735): n is a, c, g, or t
  misc_feature (738)..(738): n is a, c, g, or t
  misc_feature (741)..(741): n is a, c, g, or t
  misc_feature (747)..(747): n is a, c, g, or t
  misc_feature (750)..(750): n is a, c, g, or t
  misc_feature (753)..(753): n is a, c, g, or t
  misc_feature (759)..(759): n is a, c, g, or t
  misc_feature (762)..(762): n is a, c, g, or t
  misc_feature (765)..(765): n is a, c, g, or t
  misc_feature (768)..(768): n is a, c, g, or t
  misc_feature (774)..(774): n is a, c, g, or t
  misc_feature (777)..(777): n is a, c, g, or t
  misc_feature (780)..(780): n is a, c, g, or t
  misc_feature (786)..(786): n is a, c, g, or t
  misc_feature (792)..(792): n is a, c, g, or t
  misc_feature (795)..(795): n is a, c, g, or t
  misc_feature (798)..(798): n is a, c, g, or t
  misc_feature (801)..(801): n is a, c, g, or t
  misc_feature (804)..(804): n is a, c, g, or t
  misc_feature (810)..(810): n is a, c, g, or t
  misc_feature (813)..(813): n is a, c, g, or t
  misc_feature (816)..(816): n is a, c, g, or t
  misc_feature (822)..(822): n is a, c, g, or t
  misc_feature (825)..(825): n is a, c, g, or t
  misc_feature (831)..(831): n is a, c, g, or t
  misc_feature (834)..(834): n is a, c, g, or t
  misc_feature (840)..(840): n is a, c, g, or t
  misc_feature (846)..(846): n is a, c, g, or t
  misc_feature (849)..(849): n is a, c, g, or t
  misc_feature (855)..(855): n is a, c, g, or t
  misc_feature (858)..(858): n is a, c, g, or t
  misc_feature (864)..(864): n is a, c, g, or t
  misc_feature (867)..(867): n is a, c, g, or t
  misc_feature (870)..(870): n is a, c, g, or t
  misc_feature (873)..(873): n is a, c, g, or t
  misc_feature (876)..(876): n is a, c, g, or t
  misc_feature (879)..(879): n is a, c, g, or t
  misc_feature (882)..(882): n is a, c, g, or t
  misc_feature (885)..(885): n is a, c, g, or t
  misc_feature (888)..(888): n is a, c, g, or t
  misc_feature (891)..(891): n is a, c, g, or t
  misc_feature (894)..(894): n is a, c, g, or t
  misc_feature (897)..(897): n is a, c, g, or t
  misc_feature (900)..(900): n is a, c, g, or t
  misc_feature (903)..(903): n is a, c, g, or t
  misc_feature (909)..(909): n is a, c, g, or t
  misc_feature (912)..(912): n is a, c, g, or t
  misc_feature (915)..(915): n is a, c, g, or t
  misc_feature (918)..(918): n is a, c, g, or t
  misc_feature (924)..(924): n is a, c, g, or t
  misc_feature (927)..(927): n is a, c, g, or t
  misc_feature (933)..(933): n is a, c, g, or t
  misc_feature (936)..(936): n is a, c, g, or t
  misc_feature (939)..(939): n is a, c, g, or t
  misc_feature (945)..(945): n is a, c, g, or t
  misc_feature (951)..(951): n is a, c, g, or t
  misc_feature (954)..(954): n is a, c, g, or t
  misc_feature (960)..(960): n is a, c, g, or t
  misc_feature (963)..(963): n is a, c, g, or t
  misc_feature (966)..(966): n is a, c, g, or t
  misc_feature (969)..(969): n is a, c, g, or t
  misc_feature (972)..(972): n is a, c, g, or t
  misc_feature (975)..(975): n is a, c, g, or t
  misc_feature (978)..(978): n is a, c, g, or t
  misc_feature (981)..(981): n is a, c, g, or t
  misc_feature (984)..(984): n is a, c, g, or t
  misc_feature (987)..(987): n is a, c, g, or t
  misc_feature (990)..(990): n is a, c, g, or t
  misc_feature (993)..(993): n is a, c, g, or t
  misc_feature (996)..(996): n is a, c, g, or t
  misc_feature (999)..(999): n is a, c, g, or t
  misc_feature (1005)..(1005): n is a, c, g, or t
  misc_feature (1011)..(1011): n is a, c, g, or t
  misc_feature (1014)..(1014): n is a, c, g, or t
  misc_feature (1023)..(1023): n is a, c, g, or t
  misc_feature (1026)..(1026): n is a, c, g, or t
  misc_feature (1029)..(1029): n is a, c, g, or t
  misc_feature (1032)..(1032): n is a, c, g, or t
  misc_feature (1035)..(1035): n is a, c, g, or t
  misc_feature (1041)..(1041): n is a, c, g, or t
  misc_feature (1047)..(1047): n is a, c, g, or t
  misc_feature (1050)..(1050): n is a, c, g, or t
  misc_feature (1053)..(1053): n is a, c, g, or t
  misc_feature (1056)..(1056): n is a, c, g, or t
  misc_feature (1059)..(1059): n is a, c, g, or t
  misc_feature (1062)..(1062): n is a, c, g, or t
  misc_feature (1065)..(1065): n is a, c, g, or t
  misc_feature (1068)..(1068): n is a, c, g, or t
  misc_feature (1074)..(1074): n is a, c, g, or t
  misc_feature (1077)..(1077): n is a, c, g, or t
  misc_feature (1083)..(1083): n is a, c, g, or t
  misc_feature (1086)..(1086): n is a, c, g, or t
  misc_feature (1089)..(1089): n is a, c, g, or t
  misc_feature (1092)..(1092): n is a, c, g, or t
  misc_feature (1098)..(1098): n is a, c, g, or t
  misc_feature (1101)..(1101): n is a, c, g, or t
  misc_feature (1104)..(1104): n is a, c, g, or t
  misc_feature (1107)..(1107): n is a, c, g, or t
  misc_feature (1113)..(1113): n is a, c, g, or t
  misc_feature (1116)..(1116): n is a, c, g, or t
  misc_feature (1122)..(1122): n is a, c, g, or t
  misc_feature (1125)..(1125): n is a, c, g, or t
  misc_feature (1128)..(1128): n is a, c, g, or t
  misc_feature (1131)..(1131): n is a, c, g, or t
  misc_feature (1134)..(1134): n is a, c, g, or t
  misc_feature (1137)..(1137): n is a, c, g, or t
  misc_feature (1140)..(1140): n is a, c, g, or t
  misc_feature (1143)..(1143): n is a, c, g, or t
  misc_feature (1146)..(1146): n is a, c, g, or t
  misc_feature (1149)..(1149): n is a, c, g, or t
  misc_feature (1152)..(1152): n is a, c, g, or t
  misc_feature (1155)..(1155): n is a, c, g, or t
  misc_feature (1161)..(1161): n is a, c, g, or t
  misc_feature (1164)..(1164): n is a, c, g, or t
  misc_feature (1167)..(1167): n is a, c, g, or t
  misc_feature (1170)..(1170): n is a, c, g, or t
  misc_feature (1173)..(1173): n is a, c, g, or t
  misc_feature (1176)..(1176): n is a, c, g, or t
  misc_feature (1179)..(1179): n is a, c, g, or t
  misc_feature (1191)..(1191): n is a, c, g, or t
  misc_feature (1194)..(1194): n is a, c, g, or t
  misc_feature (1197)..(1197): n is a, c, g, or t
  misc_feature (1203)..(1203): n is a, c, g, or t
  misc_feature (1206)..(1206): n is a, c, g, or t
  misc_feature (1209)..(1209): n is a, c, g, or t
  misc_feature (1215)..(1215): n is a, c, g, or t
  misc_feature (1224)..(1224): n is a, c, g, or t
  misc_feature (1230)..(1230): n is a, c, g, or t
  misc_feature (1233)..(1233): n is a, c, g, or t
  misc_feature (1236)..(1236): n is a, c, g, or t
  misc_feature (1239)..(1239): n is a, c, g, or t
  misc_feature (1242)..(1242): n is a, c, g, or t
  misc_feature (1245)..(1245): n is a, c, g, or t
  misc_feature (1248)..(1248): n is a, c, g, or t
  misc_feature (1251)..(1251): n is a, c, g, or t
  misc_feature (1254)..(1254): n is a, c, g, or t
  misc_feature (1260)..(1260): n is a, c, g, or t
  misc_feature (1269)..(1269): n is a, c, g, or t
  misc_feature (1278)..(1278): n is a, c, g, or t
  misc_feature (1281)..(1281): n is a, c, g, or t
  misc_feature (1287)..(1287): n is a, c, g, or t
  misc_feature (1296)..(1296): n is a, c, g, or t
  misc_feature (1299)..(1299): n is a, c, g, or t
  misc_feature (1302)..(1302): n is a, c, g, or t
  misc_feature (1308)..(1308): n is a, c, g, or t
  misc_feature (1311)..(1311): n is a, c, g, or t
  misc_feature (1314)..(1314): n is a, c, g, or t
  misc_feature (1317)..(1317): n is a, c, g, or t
  misc_feature (1320)..(1320): n is a, c, g, or t
  misc_feature (1323)..(1323): n is a, c, g, or t
  misc_feature (1326)..(1326): n is a, c, g, or t
  misc_feature (1329)..(1329): n is a, c, g, or t
  misc_feature (1332)..(1332): n is a, c, g, or t
  misc_feature (1335)..(1335): n is a, c, g, or t
  misc_feature (1338)..(1338): n is a, c, g, or t
  misc_feature (1344)..(1344): n is a, c, g, or t
  misc_feature (1347)..(1347): n is a, c, g, or t
  misc_feature (1353)..(1353): n is a, c, g, or t
  misc_feature (1359)..(1359): n is a, c, g, or t
  misc_feature (1362)..(1362): n is a, c, g, or t
  misc_feature (1365)..(1365): n is a, c, g, or t
  misc_feature (1368)..(1368): n is a, c, g, or t
  misc_feature (1371)..(1371): n is a, c, g, or t
  misc_feature (1377)..(1377): n is a, c, g, or t
  misc_feature (1380)..(1380): n is a, c, g, or t
  misc_feature (1383)..(1383): n is a, c, g, or t
  misc_feature (1389)..(1389): n is a, c, g, or t
  misc_feature (1395)..(1395): n is a, c, g, or t
  misc_feature (1398)..(1398): n is a, c, g, or t
  misc_feature (1401)..(1401): n is a, c, g, or t
  misc_feature (1404)..(1404): n is a, c, g, or t
  misc_feature (1407)..(1407): n is a, c, g, or t
  misc_feature (1410)..(1410): n is a, c, g, or t
  misc_feature (1416)..(1416): n is a, c, g, or t
  misc_feature (1419)..(1419): n is a, c, g, or t
  misc_feature (1422)..(1422): n is a, c, g, or t
  misc_feature (1425)..(1425): n is a, c, g, or t
  misc_feature (1428)..(1428): n is a, c, g, or t
  misc_feature (1431)..(1431): n is a, c, g, or t
  misc_feature (1434)..(1434): n is a, c, g, or t
  misc_feature (1443)..(1443): n is a, c, g, or t
  misc_feature (1446)..(1446): n is a, c, g, or t
  misc_feature (1449)..(1449): n is a, c, g, or t
  misc_feature (1452)..(1452): n is a, c, g, or t
  misc_feature (1455)..(1455): n is a, c, g, or t
  misc_feature (1458)..(1458): n is a, c, g, or t
  misc_feature (1461)..(1461): n is a, c, g, or t
  misc_feature (1470)..(1470): n is a, c, g, or t
  misc_feature (1473)..(1473): n is a, c, g, or t
  misc_feature (1479)..(1479): n is a, c, g, or t
  misc_feature (1488)..(1488): n is a, c, g, or t
  misc_feature (1491)..(1491): n is a, c, g, or t
  misc_feature (1494)..(1494): n is a, c, g, or t
  misc_feature (1497)..(1497): n is a, c, g, or t
  misc_feature (1500)..(1500): n is a, c, g, or t
  misc_feature (1506)..(1506): n is a, c, g, or t
  misc_feature (1515)..(1515): n is a, c, g, or t
  misc_feature (1521)..(1521): n is a, c, g, or t
  misc_feature (1524)..(1524): n is a, c, g, or t
  misc_feature (1527)..(1527): n is a, c, g, or t
  misc_feature (1533)..(1533): n is a, c, g, or t
  misc_feature (1536)..(1536): n is a, c, g, or t
  misc_feature (1539)..(1539): n is a, c, g, or t
  misc_feature (1542)..(1542): n is a, c, g, or t
  misc_feature (1548)..(1548): n is a, c, g, or t
  misc_feature (1551)..(1551): n is a, c, g, or t
  misc_feature (1557)..(1557): n is a, c, g, or t
  misc_feature (1560)..(1560): n is a, c, g, or t
  misc_feature (1563)..(1563): n is a, c, g, or t
  misc_feature (1569)..(1569): n is a, c, g, or t
  misc_feature (1572)..(1572): n is a, c, g, or t
  misc_feature (1578)..(1578): n is a, c, g, or t
  misc_feature (1584)..(1584): n is a, c, g, or t
  misc_feature (1587)..(1587): n is a, c, g, or t
  misc_feature (1596)..(1596): n is a, c, g, or t
  misc_feature (1602)..(1602): n is a, c, g, or t
  misc_feature (1605)..(1605): n is a, c, g, or t
  misc_feature (1608)..(1608): n is a, c, g, or t
  misc_feature (1611)..(1611): n is a, c, g, or t
  misc_feature (1614)..(1614): n is a, c, g, or t
  misc_feature (1629)..(1629): n is a, c, g, or t
  misc_feature (1632)..(1632): n is a, c, g, or t
  misc_feature (1635)..(1635): n is a, c, g, or t
  misc_feature (1638)..(1638): n is a, c, g, or t
  misc_feature (1641)..(1641): n is a, c, g, or t
  misc_feature (1647)..(1647): n is a, c, g, or t
  misc_feature (1653)..(1653): n is a, c, g, or t
  misc_feature (1656)..(1656): n is a, c, g, or t
  misc_feature (1659)..(1659): n is a, c, g, or t
  misc_feature (1662)..(1662): n is a, c, g, or t
  misc_feature (1665)..(1665): n is a, c, g, or t
  misc_feature (1668)..(1668): n is a, c, g, or t
  misc_feature (1671)..(1671): n is a, c, g, or t
  misc_feature (1674)..(1674): n is a, c, g, or t
  misc_feature (1680)..(1680): n is a, c, g, or t
  misc_feature (1683)..(1683): n is a, c, g, or t
  misc_feature (1686)..(1686): n is a, c, g, or t
  misc_feature (1689)..(1689): n is a, c, g, or t
  misc_feature (1692)..(1692): n is a, c, g, or t
  misc_feature (1695)..(1695): n is a, c, g, or t
  misc_feature (1698)..(1698): n is a, c, g, or t
  misc_feature (1701)..(1701): n is a, c, g, or t
  misc_feature (1704)..(1704): n is a, c, g, or t
  misc_feature (1707)..(1707): n is a, c, g, or t
  misc_feature (1713)..(1713): n is a, c, g, or t
  misc_feature (1716)..(1716): n is a, c, g, or t
  misc_feature (1719)..(1719): n is a, c, g, or t
  misc_feature (1722)..(1722): n is a, c, g, or t
  misc_feature (1725)..(1725): n is a, c, g, or t
  misc_feature (1731)..(1731): n is a, c, g, or t
  misc_feature (1734)..(1734): n is a, c, g, or t
  misc_feature (1740)..(1740): n is a, c, g, or t
  misc_feature (1743)..(1743): n is a, c, g, or t
  misc_feature (1746)..(1746): n is a, c, g, or t
  misc_feature (1749)..(1749): n is a, c, g, or t
  misc_feature (1752)..(1752): n is a, c, g, or t
  misc_feature (1758)..(1758): n is a, c, g, or t
  misc_feature (1761)..(1761): n is a, c, g, or t
  misc_feature (1764)..(1764): n is a, c, g, or t
  misc_feature (1767)..(1767): n is a, c, g, or t
  misc_feature (1770)..(1770): n is a, c, g, or t
  misc_feature (1773)..(1773): n is a, c, g, or t
  misc_feature (1779)..(1779): n is a, c, g, or t
  misc_feature (1782)..(1782): n is a, c, g, or t
  misc_feature (1788)..(1788): n is a, c, g, or t
  misc_feature (1797)..(1797): n is a, c, g, or t
  misc_feature (1803)..(1803): n is a, c, g, or t
  misc_feature (1809)..(1809): n is a, c, g, or t
  misc_feature (1818)..(1818): n is a, c, g, or t
  misc_feature (1821)..(1821): n is a, c, g, or t
  misc_feature (1827)..(1827): n is a, c, g, or t
  misc_feature (1830)..(1830): n is a, c, g, or t
  misc_feature (1833)..(1833): n is a, c, g, or t
  misc_feature (1839)..(1839): n is a, c, g, or t
  misc_feature (1842)..(1842): n is a, c, g, or t
  misc_feature (1845)..(1845): n is a, c, g, or t
  misc_feature (1848)..(1848): n is a, c, g, or t
  misc_feature (1857)..(1857): n is a, c, g, or t
  misc_feature (1860)..(1860): n is a, c, g, or t
  misc_feature (1863)..(1863): n is a, c, g, or t
  misc_feature (1866)..(1866): n is a, c, g, or t
  misc_feature (1869)..(1869): n is a, c, g, or t
  misc_feature (1875)..(1875): n is a, c, g, or t
  misc_feature (1881)..(1881): n is a, c, g, or t
  misc_feature (1884)..(1884): n is a, c, g, or t
  misc_feature (1887)..(1887): n is a, c, g, or t
  misc_feature (1893)..(1893): n is a, c, g, or t
  misc_feature (1896)..(1896): n is a, c, g, or t
  misc_feature (1899)..(1899): n is a, c, g, or t
  misc_feature (1902)..(1902): n is a, c, g, or t
  misc_feature (1905)..(1905): n is a, c, g, or t
  misc_feature (1908)..(1908): n is a, c, g, or t
  misc_feature (1911)..(1911): n is a, c, g, or t
  misc_feature (1914)..(1914): n is a, c, g, or t
  misc_feature (1920)..(1920): n is a, c, g, or t
  misc_feature (1929)..(1929): n is a, c, g, or t
  misc_feature (1932)..(1932): n is a, c, g, or t
  misc_feature (1935)..(1935): n is a, c, g, or t
  misc_feature (1938)..(1938): n is a, c, g, or t
  misc_feature (1941)..(1941): n is a, c, g, or t
  misc_feature (1944)..(1944): n is a, c, g, or t
  misc_feature (1947)..(1947): n is a, c, g, or t
  misc_feature (1950)..(1950): n is a, c, g, or t
  misc_feature (1953)..(1953): n is a, c, g, or t
  misc_feature (1962)..(1962): n is a, c, g, or t
  misc_feature (1965)..(1965): n is a, c, g, or t
  misc_feature (1968)..(1968): n is a, c, g, or t
  misc_feature (1971)..(1971): n is a, c, g, or t
  misc_feature (1974)..(1974): n is a, c, g, or t
  misc_feature (1980)..(1980): n is a, c, g, or t
  misc_feature (1983)..(1983): n is a, c, g, or t
  misc_feature (1992)..(1992): n is a, c, g, or t
  misc_feature (1998)..(1998): n is a, c, g, or t
  misc_feature (2001)..(2001): n is a, c, g, or t
  misc_feature (2007)..(2007): n is a, c, g, or t
  misc_feature (2010)..(2010): n is a, c, g, or t
  misc_feature (2019)..(2019): n is a, c, g, or t
  misc_feature (2022)..(2022): n is a, c, g, or t
  misc_feature (2025)..(2025): n is a, c, g, or t
  misc_feature (2028)..(2028): n is a, c, g, or t
  misc_feature (2031)..(2031): n is a, c, g, or t
  misc_feature (2034)..(2034): n is a, c, g, or t
  misc_feature (2037)..(2037): n is a, c, g, or t
  misc_feature (2040)..(2040): n is a, c, g, or t
  misc_feature (2043)..(2043): n is a, c, g, or t
  misc_feature (2046)..(2046): n is a, c, g, or t
  misc_feature (2049)..(2049): n is a, c, g, or t
  misc_feature (2052)..(2052): n is a, c, g, or t
  misc_feature (2055)..(2055): n is a, c, g, or t
  misc_feature (2058)..(2058): n is a, c, g, or t
  misc_feature (2061)..(2061): n is a, c, g, or t
  misc_feature (2064)..(2064): n is a, c, g, or t
  misc_feature (2070)..(2070): n is a, c, g, or t
  misc_feature (2079)..(2079): n is a, c, g, or t
  misc_feature (2085)..(2085): n is a, c, g, or t
  misc_feature (2088)..(2088): n is a, c, g, or t
  misc_feature (2094)..(2094): n is a, c, g, or t
  misc_feature (2097)..(2097): n is a, c, g, or t
  misc_feature (2103)..(2103): n is a, c, g, or t
  misc_feature (2109)..(2109): n is a, c, g, or t
  misc_feature (2112)..(2112): n is a, c, g, or t
  misc_feature (2115)..(2115): n is a, c, g, or t
  misc_feature (2118)..(2118): n is a, c, g, or t
  misc_feature (2121)..(2121): n is a, c, g, or t
  misc_feature (2127)..(2127): n is a, c, g, or t
  misc_feature (2130)..(2130): n is a, c, g, or t
  misc_feature (2133)..(2133): n is a, c, g, or t
  misc_feature (2136)..(2136): n is a, c, g, or t
  misc_feature (2139)..(2139): n is a, c, g, or t
  misc_feature (2142)..(2142): n is a, c, g, or t
  misc_feature (2145)..(2145): n is a, c, g, or t
  misc_feature (2148)..(2148): n is a, c, g, or t
  misc_feature (2157)..(2157): n is a, c, g, or t
  misc_feature (2160)..(2160): n is a, c, g, or t
  misc_feature (2163)..(2163): n is a, c, g, or t
  misc_feature (2166)..(2166): n is a, c, g, or t
  misc_feature (2172)..(2172): n is a, c, g, or t
  misc_feature (2175)..(2175): n is a, c, g, or t
  misc_feature (2181)..(2181): n is a, c, g, or t
  misc_feature (2184)..(2184): n is a, c, g, or t
  misc_feature (2187)..(2187): n is a, c, g, or t
  misc_feature (2193)..(2193): n is a, c, g, or t
  misc_feature (2196)..(2196): n is a, c, g, or t
  misc_feature (2199)..(2199): n is a, c, g, or t
  misc_feature (2202)..(2202): n is a, c, g, or t
  misc_feature (2208)..(2208): n is a, c, g, or t
  misc_feature (2211)..(2211): n is a, c, g, or t
  misc_feature (2217)..(2217): n is a, c, g, or t
  misc_feature (2220)..(2220): n is a, c, g, or t
  misc_feature (2223)..(2223): n is a, c, g, or t
  misc_feature (2229)..(2229): n is a, c, g, or t
  misc_feature (2232)..(2232): n is a, c, g, or t
  misc_feature (2238)..(2238): n is a, c, g, or t
  misc_feature (2241)..(2241): n is a, c, g, or t
  misc_feature (2247)..(2247): n is a, c, g, or t
  misc_feature (2253)..(2253): n is a, c, g, or t
  misc_feature (2256)..(2256): n is a, c, g, or t
  misc_feature (2262)..(2262): n is a, c, g, or t
  misc_feature (2265)..(2265): n is a, c, g, or t
  misc_feature (2268)..(2268): n is a, c, g, or t
  misc_feature (2271)..(2271): n is a, c, g, or t
  misc_feature (2274)..(2274): n is a, c, g, or t
  misc_feature (2277)..(2277): n is a, c, g, or t
  misc_feature (2280)..(2280): n is a, c, g, or t
  misc_feature (2283)..(2283): n is a, c, g, or t
  misc_feature (2289)..(2289): n is a, c, g, or t
  misc_feature (2298)..(2298): n is a, c, g, or t
  misc_feature (2301)..(2301): n is a, c, g, or t
  misc_feature (2304)..(2304): n is a, c, g, or t
  misc_feature (2307)..(2307): n is a, c, g, or t
  misc_feature (2310)..(2310): n is a, c, g, or t
  misc_feature (2316)..(2316): n is a, c, g, or t
  misc_feature (2319)..(2319): n is a, c, g, or t
  misc_feature (2325)..(2325): n is a, c, g, or t
  misc_feature (2328)..(2328): n is a, c, g, or t
  misc_feature (2331)..(2331): n is a, c, g, or t
  misc_feature (2334)..(2334): n is a, c, g, or t
  misc_feature (2337)..(2337): n is a, c, g, or t
  misc_feature (2343)..(2343): n is a, c, g, or t
  misc_feature (2346)..(2346): n is a, c, g, or t
  misc_feature (2349)..(2349): n is a, c, g, or t
  misc_feature (2352)..(2352): n is a, c, g, or t
  misc_feature (2355)..(2355): n is a, c, g, or t
  misc_feature (2358)..(2358): n is a, c, g, or t
  misc_feature (2361)..(2361): n is a, c, g, or t
  misc_feature (2364)..(2364): n is a, c, g, or t
  misc_feature (2367)..(2367): n is a, c, g, or t
  misc_feature (2373)..(2373): n is a, c, g, or t
  misc_feature (2379)..(2379): n is a, c, g, or t
  misc_feature (2382)..(2382): n is a, c, g, or t
  misc_feature (2388)..(2388): n is a, c, g, or t
  misc_feature (2391)..(2391): n is a, c, g, or t
  misc_feature (2394)..(2394): n is a, c, g, or t
  misc_feature (2397)..(2397): n is a, c, g, or t
  misc_feature (2400)..(2400): n is a, c, g, or t
  misc_feature (2403)..(2403): n is a, c, g, or t
  misc_feature (2406)..(2406): n is a, c, g, or t
  misc_feature (2409)..(2409): n is a, c, g, or t
  misc_feature (2418)..(2418): n is a, c, g, or t
  misc_feature (2421)..(2421): n is a, c, g, or t
  misc_feature (2424)..(2424): n is a, c, g, or t
  misc_feature (2427)..(2427): n is a, c, g, or t
  misc_feature (2430)..(2430): n is a, c, g, or t
  misc_feature (2433)..(2433): n is a, c, g, or t
  misc_feature (2436)..(2436): n is a, c, g, or t
  misc_feature (2439)..(2439): n is a, c, g, or t
  misc_feature (2442)..(2442): n is a, c, g, or t
  misc_feature (2445)..(2445): n is a, c, g, or t
  misc_feature (2448)..(2448): n is a, c, g, or t
  misc_feature (2454)..(2454): n is a, c, g, or t
  misc_feature (2457)..(2457): n is a, c, g, or t
  misc_feature (2460)..(2460): n is a, c, g, or t
  misc_feature (2463)..(2463): n is a, c, g, or t
  misc_feature (2466)..(2466): n is a, c, g, or t
  misc_feature (2469)..(2469): n is a, c, g, or t
  misc_feature (2472)..(2472): n is a, c, g, or t
  misc_feature (2478)..(2478): n is a, c, g, or t
  misc_feature (2481)..(2481): n is a, c, g, or t
  misc_feature (2484)..(2484): n is a, c, g, or t
  misc_feature (2490)..(2490): n is a, c, g, or t
  misc_feature (2499)..(2499): n is a, c, g, or t
  misc_feature (2502)..(2502): n is a, c, g, or t
  misc_feature (2505)..(2505): n is a, c, g, or t
  misc_feature (2508)..(2508): n is a, c, g, or t
  misc_feature (2511)..(2511): n is a, c, g, or t
  misc_feature (2514)..(2514): n is a, c, g, or t
  misc_feature (2517)..(2517): n is a, c, g, or t
  misc_feature (2520)..(2520): n is a, c, g, or t
  misc_feature (2526)..(2526): n is a, c, g, or t
  misc_feature (2529)..(2529): n is a, c, g, or t
  misc_feature (2532)..(2532): n is a, c, g, or t
  misc_feature (2535)..(2535): n is a, c, g, or t
  misc_feature (2538)..(2538): n is a, c, g, or t
  misc_feature (2541)..(2541): n is a, c, g, or t
  misc_feature (2544)..(2544): n is a, c, g, or t
  misc_feature (2550)..(2550): n is a, c, g, or t
  misc_feature (2553)..(2553): n is a, c, g, or t
  misc_feature (2559)..(2559): n is a, c, g, or t
  misc_feature (2562)..(2562): n is a, c, g, or t
  misc_feature (2568)..(2568): n is a, c, g, or t
  misc_feature (2571)..(2571): n is a, c, g, or t
  misc_feature (2577)..(2577): n is a, c, g, or t
  misc_feature (2580)..(2580): n is a, c, g, or t
  misc_feature (2583)..(2583): n is a, c, g, or t
  misc_feature (2589)..(2589): n is a, c, g, or t
  misc_feature (2595)..(2595): n is a, c, g, or t
  misc_feature (2598)..(2598): n is a, c, g, or t
  misc_feature (2601)..(2601): n is a, c, g, or t
  misc_feature (2607)..(2607): n is a, c, g, or t
  misc_feature (2613)..(2613): n is a, c, g, or t
  misc_feature (2616)..(2616): n is a, c, g, or t
  misc_feature (2625)..(2625): n is a, c, g, or t
  misc_feature (2631)..(2631): n is a, c, g, or t
  misc_feature (2634)..(2634): n is a, c, g, or t
  misc_feature (2637)..(2637): n is a, c, g, or t
  misc_feature (2640)..(2640): n is a, c, g, or t
  misc_feature (2643)..(2643): n is a, c, g, or t
  misc_feature (2649)..(2649): n is a, c, g, or t
  misc_feature (2652)..(2652): n is a, c, g, or t
  misc_feature (2655)..(2655): n is a, c, g, or t
  misc_feature (2658)..(2658): n is a, c, g, or t
  misc_feature (2661)..(2661): n is a, c, g, or t
  misc_feature (2664)..(2664): n is a, c, g, or t
  misc_feature (2670)..(2670): n is a, c, g, or t
  misc_feature (2673)..(2673): n is a, c, g, or t
  misc_feature (2679)..(2679): n is a, c, g, or t
  misc_feature (2682)..(2682): n is a, c, g, or t
  misc_feature (2685)..(2685): n is a, c, g, or t
  misc_feature (2688)..(2688): n is a, c, g, or t
  misc_feature (2697)..(2697): n is a, c, g, or t
  misc_feature (2706)..(2706): n is a, c, g, or t
  misc_feature (2715)..(2715): n is a, c, g, or t
  misc_feature (2724)..(2724): n is a, c, g, or t
  misc_feature (2727)..(2727): n is a, c, g, or t
  misc_feature (2730)..(2730): n is a, c, g, or t
  misc_feature (2733)..(2733): n is a, c, g, or t
  misc_feature (2739)..(2739): n is a, c, g, or t
  misc_feature (2742)..(2742): n is a, c, g, or t
  misc_feature (2745)..(2745): n is a, c, g, or t
  misc_feature (2748)..(2748): n is a, c, g, or t
  misc_feature (2751)..(2751): n is a, c, g, or t
  misc_feature (2760)..(2760): n is a, c, g, or t
  misc_feature (2766)..(2766): n is a, c, g, or t
  misc_feature (2769)..(2769): n is a, c, g, or t
  misc_feature (2775)..(2775): n is a, c, g, or t
  misc_feature (2778)..(2778): n is a, c, g, or t
  misc_feature (2787)..(2787): n is a, c, g, or t
  misc_feature (2790)..(2790): n is a, c, g, or t
  misc_feature (2793)..(2793): n is a, c, g, or t
  misc_feature (2796)..(2796): n is a, c, g, or t
  misc_feature (2805)..(2805): n is a, c, g, or t
  misc_feature (2808)..(2808): n is a, c, g, or t
  misc_feature (2811)..(2811): n is a, c, g, or t
  misc_feature (2814)..(2814): n is a, c, g, or t
  misc_feature (2820)..(2820): n is a, c, g, or t
  misc_feature (2823)..(2823): n is a, c, g, or t
  misc_feature (2826)..(2826): n is a, c, g, or t
  misc_feature (2832)..(2832): n is a, c, g, or t
  misc_feature (2835)..(2835): n is a, c, g, or t
  misc_feature (2838)..(2838): n is a, c, g, or t
  misc_feature (2841)..(2841): n is a, c, g, or t
  misc_feature (2850)..(2850): n is a, c, g, or t
  misc_feature (2853)..(2853): n is a, c, g, or t
  misc_feature (2859)..(2859): n is a, c, g, or t
  misc_feature (2862)..(2862): n is a, c, g, or t
  misc_feature (2871)..(2871): n is a, c, g, or t
  misc_feature (2877)..(2877): n is a, c, g, or t
  misc_feature (2880)..(2880): n is a, c, g, or t
  misc_feature (2883)..(2883): n is a, c, g, or t
  misc_feature (2886)..(2886): n is a, c, g, or t
  misc_feature (2889)..(2889): n is a, c, g, or t
  misc_feature (2892)..(2892): n is a, c, g, or t
  misc_feature (2895)..(2895): n is a, c, g, or t
  misc_feature (2898)..(2898): n is a, c, g, or t
  misc_feature (2901)..(2901): n is a, c, g, or t
  misc_feature (2904)..(2904): n is a, c, g, or t
  misc_feature (2907)..(2907): n is a, c, g, or t
  misc_feature (2910)..(2910): n is a, c, g, or t
  misc_feature (2913)..(2913): n is a, c, g, or t
  misc_feature (2916)..(2916): n is a, c, g, or t
  misc_feature (2919)..(2919): n is a, c, g, or t
  misc_feature (2922)..(2922): n is a, c, g, or t
  misc_feature (2925)..(2925): n is a, c, g, or t
  misc_feature (2934)..(2934): n is a, c, g, or t
  misc_feature (2940)..(2940): n is a, c, g, or t
  misc_feature (2943)..(2943): n is a, c, g, or t
  misc_feature (2946)..(2946): n is a, c, g, or t
  misc_feature (2949)..(2949): n is a, c, g, or t
  misc_feature (2952)..(2952): n is a, c, g, or t
  misc_feature (2961)..(2961): n is a, c, g, or t
  misc_feature (2967)..(2967): n is a, c, g, or t
  misc_feature (2970)..(2970): n is a, c, g, or t
  misc_feature (2973)..(2973): n is a, c, g, or t
  misc_feature (2976)..(2976): n is a, c, g, or t
  misc_feature (2979)..(2979): n is a, c, g, or t
  misc_feature (2982)..(2982): n is a, c, g, or t
  misc_feature (2985)..(2985): n is a, c, g, or t
  misc_feature (2988)..(2988): n is a, c, g, or t
  misc_feature (2994)..(2994): n is a, c, g, or t
  misc_feature (2997)..(2997): n is a, c, g, or t
  misc_feature (3006)..(3006): n is a, c, g, or t
  misc_feature (3009)..(3009): n is a, c, g, or t
  misc_feature (3012)..(3012): n is a, c, g, or t
  misc_feature (3015)..(3015): n is a, c, g, or t
  misc_feature (3018)..(3018): n is a, c, g, or t
  misc_feature (3024)..(3024): n is a, c, g, or t
  misc_feature (3033)..(3033): n is a, c, g, or t
  misc_feature (3039)..(3039): n is a, c, g, or t
  misc_feature (3042)..(3042): n is a, c, g, or t
  misc_feature (3045)..(3045): n is a, c, g, or t
  misc_feature (3054)..(3054): n is a, c, g, or t
  misc_feature (3057)..(3057): n is a, c, g, or t
  misc_feature (3060)..(3060): n is a, c, g, or t
  misc_feature (3063)..(3063): n is a, c, g, or t
  misc_feature (3066)..(3066): n is a, c, g, or t
  misc_feature (3072)..(3072): n is a, c, g, or t
  misc_feature (3078)..(3078): n is a, c, g, or t
  misc_feature (3081)..(3081): n is a, c, g, or t
  misc_feature (3084)..(3084): n is a, c, g, or t
  misc_feature (3087)..(3087): n is a, c, g, or t
  misc_feature (3090)..(3090): n is a, c, g, or t
  misc_feature (3096)..(3096): n is a, c, g, or t
  misc_feature (3099)..(3099): n is a, c, g, or t
  misc_feature (3108)..(3108): n is a, c, g, or t
  misc_feature (3111)..(3111): n is a, c, g, or t
  misc_feature (3114)..(3114): n is a, c, g, or t
  misc_feature (3117)..(3117): n is a, c, g, or t
  misc_feature (3126)..(3126): n is a, c, g, or t
  misc_feature (3129)..(3129): n is a, c, g, or t
  misc_feature (3132)..(3132): n is a, c, g, or t
  misc_feature (3135)..(3135): n is a, c, g, or t
  misc_feature (3144)..(3144): n is a, c, g, or t
  misc_feature (3147)..(3147): n is a, c, g, or t
  misc_feature (3150)..(3150): n is a, c, g, or t
  misc_feature (3153)..(3153): n is a, c, g, or t
  misc_feature (3156)..(3156): n is a, c, g, or t
  misc_feature (3159)..(3159): n is a, c, g, or t
  misc_feature (3162)..(3162): n is a, c, g, or t
  misc_feature (3165)..(3165): n is a, c, g, or t
  misc_feature (3168)..(3168): n is a, c, g, or t
  misc_feature (3171)..(3171): n is a, c, g, or t
  misc_feature (3174)..(3174): n is a, c, g, or t
  misc_feature (3177)..(3177): n is a, c, g, or t
  misc_feature (3180)..(3180): n is a, c, g, or t
  misc_feature (3183)..(3183): n is a, c, g, or t
  misc_feature (3186)..(3186): n is a, c, g, or t
  misc_feature (3189)..(3189): n is a, c, g, or t
  misc_feature (3192)..(3192): n is a, c, g, or t
  misc_feature (3195)..(3195): n is a, c, g, or t
  misc_feature (3198)..(3198): n is a, c, g, or t
  misc_feature (3204)..(3204): n is a, c, g, or t
  misc_feature (3207)..(3207): n is a, c, g, or t
  misc_feature (3216)..(3216): n is a, c, g, or t
  misc_feature (3222)..(3222): n is a, c, g, or t
  misc_feature (3225)..(3225): n is a, c, g, or t
  misc_feature (3228)..(3228): n is a, c, g, or t
  misc_feature (3231)..(3231): n is a, c, g, or t
  misc_feature (3234)..(3234): n is a, c, g, or t
  misc_feature (3240)..(3240): n is a, c, g, or t
  misc_feature (3243)..(3243): n is a, c, g, or t
  misc_feature (3252)..(3252): n is a, c, g, or t
  misc_feature (3258)..(3258): n is a, c, g, or t
  misc_feature (3261)..(3261): n is a, c, g, or t
  misc_feature (3264)..(3264): n is a, c, g, or t
  misc_feature (3267)..(3267): n is a, c, g, or t
  misc_feature (3270)..(3270): n is a, c, g, or t
  misc_feature (3273)..(3273): n is a, c, g, or t
  misc_feature (3279)..(3279): n is a, c, g, or t
  misc_feature (3285)..(3285): n is a, c, g, or t
  misc_feature (3288)..(3288): n is a, c, g, or t
  misc_feature (3294)..(3294): n is a, c, g, or t
  misc_feature (3297)..(3297): n is a, c, g, or t
  misc_feature (3300)..(3300): n is a, c, g, or t
  misc_feature (3303)..(3303): n is a, c, g, or t
  misc_feature (3306)..(3306): n is a, c, g, or t
  misc_feature (3315)..(3315): n is a, c, g, or t
  misc_feature (3318)..(3318): n is a, c, g, or t
  misc_feature (3321)..(3321): n is a, c, g, or t
  misc_feature (3324)..(3324): n is a, c, g, or t
  misc_feature (3327)..(3327): n is a, c, g, or t
  misc_feature (3330)..(3330): n is a, c, g, or t
  misc_feature (3333)..(3333): n is a, c, g, or t
  misc_feature (3336)..(3336): n is a, c, g, or t
  misc_feature (3342)..(3342): n is a, c, g, or t
  misc_feature (3345)..(3345): n is a, c, g, or t
  misc_feature (3351)..(3351): n is a, c, g, or t
  misc_feature (3354)..(3354): n is a, c, g, or t
  misc_feature (3360)..(3360): n is a, c, g, or t
  misc_feature (3369)..(3369): n is a, c, g, or t
  misc_feature (3372)..(3372): n is a, c, g, or t
  misc_feature (3378)..(3378): n is a, c, g, or t
  misc_feature (3381)..(3381): n is a, c, g, or t
  misc_feature (3384)..(3384): n is a, c, g, or t
  misc_feature (3387)..(3387): n is a, c, g, or t
  misc_feature (3390)..(3390): n is a, c, g, or t
  misc_feature (3399)..(3399): n is a, c, g, or t
  misc_feature (3402)..(3402): n is a, c, g, or t
  misc_feature (3405)..(3405): n is a, c, g, or t
  misc_feature (3408)..(3408): n is a, c, g, or t
  misc_feature (3411)..(3411): n is a, c, g, or t
  misc_feature (3414)..(3414): n is a, c, g, or t
  misc_feature (3417)..(3417): n is a, c, g, or t
  misc_feature (3420)..(3420): n is a, c, g, or t
  misc_feature (3426)..(3426): n is a, c, g, or t
  misc_feature (3429)..(3429): n is a, c, g, or t
  misc_feature (3432)..(3432): n is a, c, g, or t
  misc_feature (3438)..(3438): n is a, c, g, or t
  misc_feature (3444)..(3444): n is a, c, g, or t
  misc_feature (3447)..(3447): n is a, c, g, or t
  misc_feature (3453)..(3453): n is a, c, g, or t
  misc_feature (3456)..(3456): n is a, c, g, or t
  misc_feature (3459)..(3459): n is a, c, g, or t
  misc_feature (3462)..(3462): n is a, c, g, or t
  misc_feature (3465)..(3465): n is a, c, g, or t
  misc_feature (3471)..(3471): n is a, c, g, or t
  misc_feature (3474)..(3474): n is a, c, g, or t
  misc_feature (3477)..(3477): n is a, c, g, or t
  misc_feature (3480)..(3480): n is a, c, g, or t
  misc_feature (3483)..(3483): n is a, c, g, or t
  misc_feature (3486)..(3486): n is a, c, g, or t
  misc_feature (3489)..(3489): n is a, c, g, or t
  misc_feature (3498)..(3498): n is a, c, g, or t
  misc_feature (3501)..(3501): n is a, c, g, or t
  misc_feature (3504)..(3504): n is a, c, g, or t
  misc_feature (3507)..(3507): n is a, c, g, or t
  misc_feature (3510)..(3510): n is a, c, g, or t
  misc_feature (3513)..(3513): n is a, c, g, or t
  misc_feature (3516)..(3516): n is a, c, g, or t
  misc_feature (3519)..(3519): n is a, c, g, or t
  misc_feature (3522)..(3522): n is a, c, g, or t
  misc_feature (3525)..(3525): n is a, c, g, or t
  misc_feature (3528)..(3528): n is a, c, g, or t
  misc_feature (3531)..(3531): n is a, c, g, or t
  misc_feature (3534)..(3534): n is a, c, g, or t
  misc_feature (3537)..(3537): n is a, c, g, or t
  misc_feature (3540)..(3540): n is a, c, g, or t
  misc_feature (3543)..(3543): n is a, c, g, or t
  misc_feature (3546)..(3546): n is a, c, g, or t
  misc_feature (3549)..(3549): n is a, c, g, or t
  misc_feature (3552)..(3552): n is a, c, g, or t
  misc_feature (3555)..(3555): n is a, c, g, or t
  misc_feature (3558)..(3558): n is a, c, g, or t
  misc_feature (3561)..(3561): n is a, c, g, or t
  misc_feature (3573)..(3573): n is a, c, g, or t
  misc_feature (3579)..(3579): n is a, c, g, or t
  misc_feature (3582)..(3582): n is a, c, g, or t
  misc_feature (3585)..(3585): n is a, c, g, or t
  misc_feature (3588)..(3588): n is a, c, g, or t
  misc_feature (3591)..(3591): n is a, c, g, or t
  misc_feature (3600)..(3600): n is a, c, g, or t
  misc_feature (3603)..(3603): n is a, c, g, or t
  misc_feature (3606)..(3606): n is a, c, g, or t
  misc_feature (3609)..(3609): n is a, c, g, or t
  misc_feature (3612)..(3612): n is a, c, g, or t
  misc_feature (3618)..(3618): n is a, c, g, or t
  misc_feature (3621)..(3621): n is a, c, g, or t
  misc_feature (3624)..(3624): n is a, c, g, or t
  misc_feature (3627)..(3627): n is a, c, g, or t
  misc_feature (3630)..(3630): n is a, c, g, or t
  misc_feature (3633)..(3633): n is a, c, g, or t
  misc_feature (3636)..(3636): n is a, c, g, or t
  misc_feature (3639)..(3639): n is a, c, g, or t
  misc_feature (3642)..(3642): n is a, c, g, or t
  misc_feature (3645)..(3645): n is a, c, g, or t
  misc_feature (3648)..(3648): n is a, c, g, or t
  misc_feature (3651)..(3651): n is a, c, g, or t
  misc_feature (3654)..(3654): n is a, c, g, or t
  misc_feature (3657)..(3657): n is a, c, g, or t
  misc_feature (3660)..(3660): n is a, c, g, or t
  misc_feature (3666)..(3666): n is a, c, g, or t
  misc_feature (3669)..(3669): n is a, c, g, or t
  misc_feature (3672)..(3672): n is a, c, g, or t
  misc_feature (3675)..(3675): n is a, c, g, or t
  misc_feature (3681)..(3681): n is a, c, g, or t
  misc_feature (3684)..(3684): n is a, c, g, or t
  misc_feature (3693)..(3693): n is a, c, g, or t
  misc_feature (3696)..(3696): n is a, c, g, or t
  misc_feature (3699)..(3699): n is a, c, g, or t
  misc_feature (3702)..(3702): n is a, c, g, or t
  misc_feature (3705)..(3705): n is a, c, g, or t
  misc_feature (3708)..(3708): n is a, c, g, or t
  misc_feature (3711)..(3711): n is a, c, g, or t
  misc_feature (3714)..(3714): n is a, c, g, or t
  misc_feature (3717)..(3717): n is a, c, g, or t
  misc_feature (3720)..(3720): n is a, c, g, or t
  misc_feature (3723)..(3723): n is a, c, g, or t
  misc_feature (3726)..(3726): n is a, c, g, or t
  misc_feature (3729)..(3729): n is a, c, g, or t
  misc_feature (3732)..(3732): n is a, c, g, or t
  misc_feature (3735)..(3735): n is a, c, g, or t
  misc_feature (3738)..(3738): n is a, c, g, or t
  misc_feature (3747)..(3747): n is a, c, g, or t
  misc_feature (3753)..(3753): n is a, c, g, or t
  misc_feature (3756)..(3756): n is a, c, g, or t
  misc_feature (3765)..(3765): n is a, c, g, or t
  misc_feature (3774)..(3774): n is a, c, g, or t
  misc_feature (3783)..(3783): n is a, c, g, or t
  misc_feature (3786)..(3786): n is a, c, g, or t
  misc_feature (3789)..(3789): n is a, c, g, or t
  misc_feature (3792)..(3792): n is a, c, g, or t
  misc_feature (3798)..(3798): n is a, c, g, or t
  misc_feature (3801)..(3801): n is a, c, g, or t
  misc_feature (3804)..(3804): n is a, c, g, or t
  misc_feature (3810)..(3810): n is a, c, g, or t
  misc_feature (3813)..(3813): n is a, c, g, or t
  misc_feature (3819)..(3819): n is a, c, g, or t
  misc_feature (3825)..(3825): n is a, c, g, or t
  misc_feature (3828)..(3828): n is a, c, g, or t
  misc_feature (3831)..(3831): n is a, c, g, or t
  misc_feature (3834)..(3834): n is a, c, g, or t
  misc_feature (3837)..(3837): n is a, c, g, or t
  misc_feature (3846)..(3846): n is a, c, g, or t
  misc_feature (3849)..(3849): n is a, c, g, or t
  misc_feature (3852)..(3852): n is a, c, g, or t
  misc_feature (3855)..(3855): n is a, c, g, or t
  misc_feature (3858)..(3858): n is a, c, g, or t
  misc_feature (3861)..(3861): n is a, c, g, or t
  misc_feature (3864)..(3864): n is a, c, g, or t
  misc_feature (3867)..(3867): n is a, c, g, or t
  misc_feature (3873)..(3873): n is a, c, g, or t
  misc_feature (3876)..(3876): n is a, c, g, or t
  misc_feature (3879)..(3879): n is a, c, g, or t
  misc_feature (3882)..(3882): n is a, c, g, or t
  misc_feature (3885)..(3885): n is a, c, g, or t
  misc_feature (3888)..(3888): n is a, c, g, or t
  misc_feature (3891)..(3891): n is a, c, g, or t
  misc_feature (3894)..(3894): n is a, c, g, or t
  misc_feature (3897)..(3897): n is a, c, g, or t
  misc_feature (3900)..(3900): n is a, c, g, or t
  misc_feature (3906)..(3906): n is a, c, g, or t
  misc_feature (3909)..(3909): n is a, c, g, or t
  misc_feature (3912)..(3912): n is a, c, g, or t
  misc_feature (3915)..(3915): n is a, c, g, or t
  misc_feature (3918)..(3918): n is a, c, g, or t
  misc_feature (3924)..(3924): n is a, c, g, or t
  misc_feature (3936)..(3936): n is a, c, g, or t
  misc_feature (3939)..(3939): n is a, c, g, or t
  misc_feature (3945)..(3945): n is a, c, g, or t
  misc_feature (3948)..(3948): n is a, c, g, or t
  misc_feature (3951)..(3951): n is a, c, g, or t
  misc_feature (3954)..(3954): n is a, c, g, or t
  misc_feature (3957)..(3957): n is a, c, g, or t
  misc_feature (3960)..(3960): n is a, c, g, or t
  misc_feature (3963)..(3963): n is a, c, g, or t
  misc_feature (3966)..(3966): n is a, c, g, or t
  misc_feature (3972)..(3972): n is a, c, g, or t
  misc_feature (3975)..(3975): n is a, c, g, or t
  misc_feature (3978)..(3978): n is a, c, g, or t
  misc_feature (3984)..(3984): n is a, c, g, or t
  misc_feature (3987)..(3987): n is a, c, g, or t
  misc_feature (3993)..(3993): n is a, c, g, or t
  misc_feature (3996)..(3996): n is a, c, g, or t
  misc_feature (3999)..(3999): n is a, c, g, or t
  misc_feature (4002)..(4002): n is a, c, g, or t
  misc_feature (4008)..(4008): n is a, c, g, or t
  misc_feature (4011)..(4011): n is a, c, g, or t
  misc_feature (4014)..(4014): n is a, c, g, or t
  misc_feature (4017)..(4017): n is a, c, g, or t
  misc_feature (4020)..(4020): n is a, c, g, or t
  misc_feature (4023)..(4023): n is a, c, g, or t
  misc_feature (4026)..(4026): n is a, c, g, or t
  misc_feature (4035)..(4035): n is a, c, g, or t
  misc_feature (4041)..(4041): n is a, c, g, or t
  misc_feature (4044)..(4044): n is a, c, g, or t
  misc_feature (4047)..(4047): n is a, c, g, or t
  misc_feature (4053)..(4053): n is a, c, g, or t
  misc_feature (4056)..(4056): n is a, c, g, or t
  misc_feature (4059)..(4059): n is a, c, g, or t
  misc_feature (4062)..(4062): n is a, c, g, or t
  misc_feature (4065)..(4065): n is a, c, g, or t
  misc_feature (4071)..(4071): n is a, c, g, or t
  misc_feature (4074)..(4074): n is a, c, g, or t
  misc_feature (4077)..(4077): n is a, c, g, or t
  misc_feature (4080)..(4080): n is a, c, g, or t
  misc_feature (4083)..(4083): n is a, c, g, or t
  misc_feature (4086)..(4086): n is a, c, g, or t
  misc_feature (4089)..(4089): n is a, c, g, or t
  misc_feature (4092)..(4092): n is a, c, g, or t
  misc_feature (4095)..(4095): n is a, c, g, or t
  misc_feature (4098)..(4098): n is a, c, g, or t
  misc_feature (4101)..(4101): n is a, c, g, or t
  misc_feature (4107)..(4107): n is a, c, g, or t
  misc_feature (4113)..(4113): n is a, c, g, or t
  misc_feature (4116)..(4116): n is a, c, g, or t
  misc_feature (4125)..(4125): n is a, c, g, or t
  misc_feature (4131)..(4131): n is a, c, g, or t
  misc_feature (4134)..(4134): n is a, c, g, or t
  misc_feature (4137)..(4137): n is a, c, g, or t
  misc_feature (4140)..(4140): n is a, c, g, or t
  misc_feature (4143)..(4143): n is a, c, g, or t
  misc_feature (4146)..(4146): n is a, c, g, or t
  misc_feature (4149)..(4149): n is a, c, g, or t
  misc_feature (4152)..(4152): n is a, c, g, or t
  misc_feature (4155)..(4155): n is a, c, g, or t
  misc_feature (4161)..(4161): n is a, c, g, or t
  misc_feature (4167)..(4167): n is a, c, g, or t
  misc_feature (4170)..(4170): n is a, c, g, or t
  misc_feature (4173)..(4173): n is a, c, g, or t
  misc_feature (4179)..(4179): n is a, c, g, or t
  misc_feature (4185)..(4185): n is a, c, g, or t
ggnccnccnggnccnccnggnccncarggnccnathggnccnytnggngcnccnggnccnathggnytnwsnggngaraarggnatgmgnggngaymgnggnccnccnggngcngcnggngayaarggngayaarggnccnacnggngtnccnggnttyccnggnytngayggnathccnggncayccnggnccnccnggnccnmgnggnaarccnggnatgwsnggncayaayggnwsnmgnggngayccnggnttyccnggnggnmgnggngcnytnggnccnggnggnccnytnggncayccnggngaraarggngaraarggnaaywsngtnttyathytnggngcngtnaarggnathcarggngaymgnggngayccnggnytnccnggnytnccnggnwsntggggngcnggnggnccngcnggnccnacnggntayccnggngarccnggnytngtnggnccnccnggncarccnggnmgnccnggnytnaarggnaayccnggngtnggngtnaarggncaratgggngayccnggngargtnggncarcarggnwsnccnggnccnacnytnytngtngarccnccngayttytgyytntayaarggngaraarggnathaarggnathccnggnatggtnggnytnccnggnccnccnggnmgnaarggngarwsnggnathggngcnaarggngaraarggnathccnggnttyccnggnccnmgnggngayccnggnwsntayggnwsnccnggnttyccnggnytnaarggngarytnggnytngtnggngayccnggnytnttyggnytnathggnccnaarggngayccnggnaaymgnggncayccnggnccnccnggngtnytngtnacnccnccnytnccnytnaarggnccnccnggngayccnggnttyccnggnmgntayggngaracnggngaygtnggnccnccnggnccnccnggnytnytnggnmgnccnggngargcntgygcnggnatgathggnccnccnggnccncarggnttyccnggnytnccnggnytnccnggngargcnggnathccnggnmgnccngaywsngcnccnggnaarccnggnaarccnggnwsnccnggnytnccnggngcnccnggnytncarggnytnccnggnwsnwsngtnathtaytgywsngtnggnaayccnggnccncarggnathaarggnaargtnggnccnccnggnggnmgnggnccnaarggngaraarggnaaygarggnytntgygcntgygarccnggnccnatgggnccnccnggnccnccnggnytnccnggnmgncarggnwsnaarggngayytnggnytnccnggntggytnggnacnaarggngayccnggnccnccnggngcngarggnccnccnggnytnccnggnaarcayggngcnwsnggnccnccnggnaayaarggngcnaarggngayatggtngtnwsnmgngtnaarggncayaarggngarmgnggnccngayggnccnccnggnttyccnggncarccnggnwsncayggnmgngayggncaygcnggngaraarggngayccnggnccnccnggngaycaygargaygcnacnccnggnggnaarggnttyccnggnccnytnggnccnccnggnaargcnggnccngtnggnccnccnggnytnggnttyccnggnccnccnggngarmgnggncayccnggngtnccnggncayccnggngtnmgnggnccngayggnytnaarggncaraarggngayacnathwsntgyaaygtnacntayccnggnmgncayggnccnccnggnttygayggnccnccnggnccnaarggnttyccnggnccncarggngcnccnggnytnwsnggnwsngayggncayaarggnmgnccnggnacnccnggnacngcngarathccnggnccnccnggnttymgnggngayatgggngayccnggnttyggnggngaraarggnwsnwsnccngtnggnccnccnggnccnccnggnwsnccnggngtnaayggncaraarggnathccnggngayccngcnttyggncayytnggnccnccnggnaarmgnggnytnwsnggngtnccnggnathaarggnccnmgnggngayccnggntgyccnggngcngarggnccngcnggnathccnggnttyytnggnytnaarggnccnaarggnmgngarggncaygcnggnttyccnggngtnccnggnccnccnggncaywsntgygarmgnggngcnccnggnathccnggncarccnggnytnccnggntayccnggnwsnccnggngcnccnggnggnaarggncarccnggngaygtnggnccnccnggnccngcnggnatgaarggnytnccnggnytnccnggnmgnccnggngcncayggnccnccnggnytnccnggnathccnggnccnttyggngaygayggnytnccnggnccnccnggnccnaarggnccnmgnggnytnccnggnttyccnggnttyccnggngarmgnggnaarccnggngcngarggntgyccnggngcnaarggngarccnggngaraarggnatgwsnggnytnccnggngaymgnggnytnmgnggngcnaarggngcnathggnccnccnggngaygarggngaratggcnathathwsncaraarggnacnccnggngarccnggnccnccnggngaygayggnttyccnggngarmgnggngayaarggnacnccnggnatgcarggnmgnmgnggngarccnggnmgntayggnccnccnggnttycaymgnggngarccnggngaraarggncarccnggnccnccnggnccnccnggnccnccnggnwsnacnggnytnmgnggnttyathggnttyccnggnytnccnggngaycarggngarccnggnwsnccnggnccnccnggnttywsnggnathgayggngcnmgnggnccnaarggnaayaarggngayccngcnwsncayttyggnccnccnggnccnaarggngarccnggnwsnccnggntgyccnggncayttyggngcnwsnggngarcarggnytnccnggnathcarggnccnmgnggnwsnccnggnmgnccnggnccnccnggnwsnwsnggnccnccnggntgyccnggngaycayggnatgccnggnytnmgnggncarccnggngaratgggngayccnggnccnmgnggnytncarggngayccnggnathccnggnccnccnggnathaarggnccnwsnggnwsnccnggnytnaayggnytncayggnytnaarggncaraarggnacnaarggngcnwsnggnytncaygaygtnggnccnccnggnccngtnggnathccnggnytnaarggngarmgnggngayccnggnwsnccnggnathwsnccnccnggnccnmgnggnaaraarggnccnccnggnccnccnggnwsnwsnggnccnccnggnccngcnggngcnacnggnmgngcnccnaargayathccngayccnggnccnccnggngaycarggnccnccnggnccngayggnccnmgnggngcnccnggnccnccnggnytnccnggnwsngtngayytnytnmgnggngarccnggngaytgyggnytnccnggnccnccnggnccnccnggnccnccnggnccnccnggntayaarggnttyccnggntgygayggnaargayggncaraarggnccngtnggnttyccnggnccncarggnccncayggnttyccnggnccnccnggngaraarggnytnccnggnccnccnggnmgnaarggnccnacnggnytnccnggnccnmgnggngarccnggnccnccngcngaygtngaygaytgyccnmgnathccnggnytnccnggngcnccnggnatgmgnggnccngarggngcnatgggnytnccnggnatgmgnggnccnwsnggnccnggntgyaarggngarccnggnytngayggnmgnmgnggngtngayggngtnccnggnwsnccnggnccnccnggnmgnaarggngayacnggngargayggntayccnggnggnccnggnccnccnggnccnathggngayccnggnccnaarggnttyggn

SEQ ID NO: 1104 - DNA, 4245 bp, Artificial Sequence
  hCol-CNA09 (alpha5(IV) THD)
  misc_feature (3)..(3): n is a, c, g, or t
  misc_feature (12)..(12): n is a, c, g, or t
  misc_feature (21)..(21): n is a, c, g, or t
  misc_feature (27)..(27): n is a, c, g, or t
  misc_feature (30)..(30): n is a, c, g, or t
  misc_feature (36)..(36): n is a, c, g, or t
  misc_feature (39)..(39): n is a, c, g, or t
  misc_feature (42)..(42): n is a, c, g, or t
  misc_feature (48)..(48): n is a, c, g, or t
  misc_feature (54)..(54): n is a, c, g, or t
  misc_feature (57)..(57): n is a, c, g, or t
  misc_feature (60)..(60): n is a, c, g, or t
  misc_feature (63)..(63): n is a, c, g, or t
  misc_feature (66)..(66): n is a, c, g, or t
  misc_feature (72)..(72): n is a, c, g, or t
  misc_feature (75)..(75): n is a, c, g, or t
  misc_feature (78)..(78): n is a, c, g, or t
  misc_feature (84)..(84): n is a, c, g, or t
  misc_feature (87)..(87): n is a, c, g, or t
  misc_feature (90)..(90): n is a, c, g, or t
  misc_feature (93)..(93): n is a, c, g, or t
  misc_feature (96)..(96): n is a, c, g, or t
  misc_feature (99)..(99): n is a, c, g, or t
  misc_feature (102)..(102): n is a, c, g, or t
  misc_feature (111)..(111): n is a, c, g, or t
  misc_feature (120)..(120): n is a, c, g, or t
  misc_feature (126)..(126): n is a, c, g, or t
  misc_feature (129)..(129): n is a, c, g, or t
  misc_feature (132)..(132): n is a, c, g, or t
  misc_feature (135)..(135): n is a, c, g, or t
  misc_feature (138)..(138): n is a, c, g, or t
  misc_feature (141)..(141): n is a, c, g, or t
  misc_feature (147)..(147): n is a, c, g, or t
  misc_feature (153)..(153): n is a, c, g, or t
  misc_feature (156)..(156): n is a, c, g, or t
  misc_feature (159)..(159): n is a, c, g, or t
  misc_feature (162)..(162): n is a, c, g, or t
  misc_feature (165)..(165): n is a, c, g, or t
  misc_feature (168)..(168): n is a, c, g, or t
  misc_feature (171)..(171): n is a, c, g, or t
  misc_feature (174)..(174): n is a, c, g, or t
  misc_feature (180)..(180): n is a, c, g, or t
  misc_feature (183)..(183): n is a, c, g, or t
  misc_feature (186)..(186): n is a, c, g, or t
  misc_feature (189)..(189): n is a, c, g, or t
  misc_feature (192)..(192): n is a, c, g, or t
  misc_feature (195)..(195): n is a, c, g, or t
  misc_feature (198)..(198): n is a, c, g, or t
  misc_feature (201)..(201): n is a, c, g, or t
  misc_feature (207)..(207): n is a, c, g, or t
  misc_feature (210)..(210): n is a, c, g, or t
  misc_feature (219)..(219): n is a, c, g, or t
  misc_feature (222)..(222): n is a, c, g, or t
  misc_feature (225)..(225): n is a, c, g, or t
  misc_feature (228)..(228): n is a, c, g, or t
  misc_feature (231)..(231): n is a, c, g, or t
  misc_feature (237)..(237): n is a, c, g, or t
  misc_feature (243)..(243): n is a, c, g, or t
  misc_feature (246)..(246): n is a, c, g, or t
  misc_feature (255)..(255): n is a, c, g, or t
  misc_feature (258)..(258): n is a, c, g, or t
  misc_feature (264)..(264): n is a, c, g, or t
  misc_feature (270)..(270): n is a, c, g, or t
  misc_feature (273)..(273): n is a, c, g, or t
  misc_feature (279)..(279): n is a, c, g, or t
  misc_feature (282)..(282): n is a, c, g, or t
  misc_feature (285)..(285): n is a, c, g, or t
  misc_feature (288)..(288): n is a, c, g, or t
  misc_feature (291)..(291): n is a, c, g, or t
  misc_feature (297)..(297): n is a, c, g, or t
  misc_feature (300)..(300): n is a, c, g, or t
  misc_feature (303)..(303): n is a, c, g, or t
  misc_feature (309)..(309): n is a, c, g, or t
  misc_feature (312)..(312): n is a, c, g, or t
  misc_feature (315)..(315): n is a, c, g, or t
  misc_feature (318)..(318): n is a, c, g, or t
  misc_feature (321)..(321): n is a, c, g, or t
  misc_feature (324)..(324): n is a, c, g, or t
  misc_feature (327)..(327): n is a, c, g, or t
  misc_feature (333)..(333): n is a, c, g, or t
  misc_feature (336)..(336): n is a, c, g, or t
  misc_feature (345)..(345): n is a, c, g, or t
  misc_feature (351)..(351): n is a, c, g, or t
  misc_feature (354)..(354): n is a, c, g, or t
  misc_feature (357)..(357): n is a, c, g, or t
  misc_feature (369)..(369): n is a, c, g, or t
  misc_feature (372)..(372): n is a, c, g, or t
  misc_feature (375)..(375): n is a, c, g, or t
  misc_feature (378)..(378): n is a, c, g, or t
  misc_feature (381)..(381): n is a, c, g, or t
  misc_feature (384)..(384): n is a, c, g, or t
  misc_feature (390)..(390): n is a, c, g, or t
  misc_feature (396)..(396): n is a, c, g, or t
  misc_feature (399)..(399): n is a, c, g, or t
  misc_feature (405)..(405): n is a, c, g, or t
  misc_feature (408)..(408): n is a, c, g, or t
  misc_feature (411)..(411): n is a, c, g, or t
  misc_feature (414)..(414): n is a, c, g, or t
  misc_feature (417)..(417): n is a, c, g, or t
  misc_feature (426)..(426): n is a, c, g, or t
  misc_feature (429)..(429): n is a, c, g, or t
  misc_feature (432)..(432): n is a, c, g, or t
  misc_feature (435)..(435): n is a, c, g, or t
  misc_feature (438)..(438): n is a, c, g, or t
  misc_feature (441)..(441): n is a, c, g, or t
  misc_feature (444)..(444): n is a, c, g, or t
  misc_feature (450)..(450): n is a, c, g, or t
  misc_feature (453)..(453): n is a, c, g, or t
  misc_feature (456)..(456): n is a, c, g, or t
  misc_feature (462)..(462): n is a, c, g, or t
  misc_feature (465)..(465): n is a, c, g, or t
  misc_feature (468)..(468): n is a, c, g, or t
  misc_feature (471)..(471): n is a, c, g, or t
  misc_feature (474)..(474): n is a, c, g, or t
  misc_feature (477)..(477): n is a, c, g, or t
  misc_feature (480)..(480): n is a, c, g, or t
  misc_feature (483)..(483): n is a, c, g, or t
  misc_feature (489)..(489): n is a, c, g, or t
  misc_feature (492)..(492): n is a, c, g, or t
  misc_feature (495)..(495): n is a, c, g, or t
  misc_feature (498)..(498): n is a, c, g, or t
  misc_feature (501)..(501): n is a, c, g, or t
  misc_feature (504)..(504): n is a, c, g, or t
  misc_feature (507)..(507): n is a, c, g, or t
  misc_feature (510)..(510): n is a, c, g, or t
  misc_feature (513)..(513): n is a, c, g, or t
  misc_feature (516)..(516): n is a, c, g, or t
  misc_feature (519)..(519): n is a, c, g, or t
  misc_feature (525)..(525): n is a, c, g, or t
  misc_feature (534)..(534): n is a, c, g, or t
  misc_feature (537)..(537): n is a, c, g, or t
  misc_feature (549)..(549): n is a, c, g, or t
  misc_feature (552)..(552): n is a, c, g, or t
  misc_feature (558)..(558): n is a, c, g, or t
  misc_feature (567)..(567): n is a, c, g, or t
  misc_feature (576)..(576): n is a, c, g, or t
  misc_feature (579)..(579): n is a, c, g, or t
  misc_feature (585)..(585): n is a, c, g, or t
  misc_feature (588)..(588): n is a, c, g, or t
  misc_feature (591)..(591): n is a, c, g, or t
  misc_feature (594)..(594): n is a, c, g, or t
  misc_feature (597)..(597): n is a, c, g, or t
  misc_feature (600)..(600): n is a, c, g, or t
  misc_feature (603)..(603): n is a, c, g, or t
  misc_feature (612)..(612): n is a, c, g, or t
  misc_feature (624)..(624): n is a, c, g, or t
  misc_feature (627)..(627): n is a, c, g, or t
  misc_feature (636)..(636): n is a, c, g, or t
  misc_feature (651)..(651): n is a, c, g, or t
  misc_feature (660)..(660): n is a, c, g, or t
  misc_feature (663)..(663): n is a, c, g, or t
  misc_feature (666)..(666): n is a, c, g, or t
  misc_feature (669)..(669): n is a, c, g, or t
  misc_feature (675)..(675): n is a, c, g, or t
  misc_feature (678)..(678): n is a, c, g, or t
  misc_feature (681)..(681): n is a, c, g, or t
  misc_feature (684)..(684): n is a, c, g, or t
  misc_feature (687)..(687): n is a, c, g, or t
  misc_feature (690)..(690): n is a, c, g, or t
  misc_feature (693)..(693): n is a, c, g, or t
  misc_feature (696)..(696): n is a, c, g, or t
  misc_feature (702)..(702): n is a, c, g, or t
  misc_feature (705)..(705): n is a, c, g, or t
  misc_feature (708)..(708): n is a, c, g, or t
  misc_feature (711)..(711): n is a, c, g, or t
  misc_feature (714)..(714): n is a, c, g, or t
  misc_feature (717)..(717): n is a, c, g, or t
  misc_feature (720)..(720): n is a, c, g, or t
  misc_feature (723)..(723): n is a, c, g, or t
  misc_feature (726)..(726): n is a, c, g, or t
  misc_feature (735)..(735): n is a, c, g, or t
  misc_feature (744)..(744): n is a, c, g, or t
  misc_feature (753)..(753): n is a, c, g, or t
  misc_feature (759)..(759): n is a, c, g, or t
  misc_feature (762)..(762): n is a, c, g, or t
  misc_feature (768)..(768): n is a, c, g, or t
  misc_feature (771)..(771): n is a, c, g, or t
  misc_feature (777)..(777): n is a, c, g, or t
  misc_feature (780)..(780): n is a, c, g, or t
  misc_feature (789)..(789): n is a, c, g, or t
  misc_feature (798)..(798): n is a, c, g, or t
  misc_feature (804)..(804): n is a, c, g, or t
  misc_feature (807)..(807): n is a, c, g, or t
  misc_feature (813)..(813): n is a, c, g, or t
  misc_feature (816)..(816): n is a, c, g, or t
  misc_feature (819)..(819): n is a, c, g, or t
  misc_feature (822)..(822): n is a, c, g, or t
  misc_feature (825)..(825): n is a, c, g, or t
  misc_feature (831)..(831): n is a, c, g, or t
  misc_feature (834)..(834): n is a, c, g, or t
  misc_feature (840)..(840): n is a, c, g, or t
  misc_feature (843)..(843): n is a, c, g, or t
  misc_feature (849)..(849): n is a, c, g, or t
  misc_feature (852)..(852): n is a, c, g, or t
  misc_feature (855)..(855): n is a, c, g, or t
  misc_feature (861)..(861): n is a, c, g, or t
  misc_feature (870)..(870): n is a, c, g, or t
  misc_feature (879)..(879): n is a, c, g, or t
  misc_feature (885)..(885): n is a, c, g, or t
  misc_feature (888)..(888): n is a, c, g, or t
  misc_feature (891)..(891): n is a, c, g, or t
  misc_feature (894)..(894): n is a, c, g, or t
  misc_feature (897)..(897): n is a, c, g, or t
  misc_feature (900)..(900): n is a, c, g, or t
  misc_feature (903)..(903): n is a, c, g, or t
  misc_feature (906)..(906): n is a, c, g, or t
  misc_feature (909)..(909): n is a, c, g, or t
  misc_feature (912)..(912): n is a, c, g, or t
  misc_feature (918)..(918): n is a, c, g, or t
  misc_feature (921)..(921): n is a, c, g, or t
  misc_feature (924)..(924): n is a, c, g, or t
  misc_feature (927)..(927): n is a, c, g, or t
  misc_feature (930)..(930): n is a, c, g, or t
  misc_feature (933)..(933): n is a, c, g, or t
  misc_feature (939)..(939): n is a, c, g, or t
  misc_feature (945)..(945): n is a, c, g, or t
  misc_feature (954)..(954): n is a, c, g, or t
  misc_feature (963)..(963): n is a, c, g, or t
  misc_feature (966)..(966): n is a, c, g, or t
  misc_feature (969)..(969): n is a, c, g, or t
  misc_feature (972)..(972): n is a, c, g, or t
  misc_feature (975)..(975): n is a, c, g, or t
  misc_feature (978)..(978): n is a, c, g, or t
  misc_feature (981)..(981): n is a, c, g, or t
  misc_feature (990)..(990): n is a, c, g, or t
  misc_feature (996)..(996): n is a, c, g, or t
  misc_feature (999)..(999): n is a, c, g, or t
  misc_feature (1005)..(1005): n is a, c, g, or t
  misc_feature (1008)..(1008): n is a, c, g, or t
  misc_feature (1017)..(1017): n is a, c, g, or t
  misc_feature (1020)..(1020): n is a, c, g, or t
  misc_feature (1023)..(1023): n is a, c, g, or t
  misc_feature (1026)..(1026): n is a, c, g, or t
  misc_feature (1029)..(1029): n is a, c, g, or t
  misc_feature (1032)..(1032): n is a, c, g, or t
  misc_feature (1035)..(1035): n is a, c, g, or t
  misc_feature (1038)..(1038): n is a, c, g, or t
  misc_feature (1041)..(1041): n is a, c, g, or t
  misc_feature (1044)..(1044): n is a, c, g, or t
  misc_feature (1047)..(1047): n is a, c, g, or t
  misc_feature (1050)..(1050): n is a, c, g, or t
  misc_feature (1053)..(1053): n is a, c, g, or t
  misc_feature (1059)..(1059): n is a, c, g, or t
  misc_feature (1062)..(1062): n is a, c, g, or t
  misc_feature (1065)..(1065): n is a, c, g, or t
  misc_feature (1068)..(1068): n is a, c, g, or t
  misc_feature (1071)..(1071): n is a, c, g, or t
  misc_feature (1074)..(1074): n is a, c, g, or t
  misc_feature (1077)..(1077): n is a, c, g, or t
  misc_feature (1083)..(1083): n is a, c, g, or t
  misc_feature (1086)..(1086): n is a, c, g, or t
  misc_feature (1092)..(1092): n is a, c, g, or t
  misc_feature (1095)..(1095): n is a, c, g, or t
  misc_feature (1104)..(1104): n is a, c, g, or t
  misc_feature (1113)..(1113): n is a, c, g, or t
  misc_feature (1116)..(1116): n is a, c, g, or t
  misc_feature (1119)..(1119): n is a, c, g, or t
  misc_feature (1122)..(1122): n is a, c, g, or t
  misc_feature (1128)..(1128): n is a, c, g, or t
  misc_feature (1134)..(1134): n is a, c, g, or t
  misc_feature (1137)..(1137): n is a, c, g, or t
  misc_feature (1140)..(1140): n is a, c, g, or t
  misc_feature (1143)..(1143): n is a, c, g, or t
  misc_feature (1146)..(1146): n is a, c, g, or t
  misc_feature (1149)..(1149): n is a, c, g, or t
  misc_feature (1155)..(1155): n is a, c, g, or t
  misc_feature (1161)..(1161): n is a, c, g, or t
  misc_feature (1164)..(1164): n is a, c, g, or t
  misc_feature (1167)..(1167): n is a, c, g, or t
  misc_feature (1170)..(1170): n is a, c, g, or t
  misc_feature (1173)..(1173): n is a, c, g, or t
  misc_feature (1176)..(1176): n is a, c, g, or t
  misc_feature (1179)..(1179): n is a, c, g, or t
  misc_feature (1182)..(1182): n is a, c, g, or t
  misc_feature (1185)..(1185): n is a, c, g, or t
  misc_feature (1188)..(1188): n is a, c, g, or t
  misc_feature (1191)..(1191): n is a, c, g, or t
  misc_feature (1194)..(1194): n is a, c, g, or t
  misc_feature (1197)..(1197): n is a, c, g, or t
  misc_feature (1200)..(1200): n is a, c, g, or t
  misc_feature (1203)..(1203): n is a, c, g, or t
  misc_feature (1212)..(1212): n is a, c, g, or t
  misc_feature (1215)..(1215): n is a, c, g, or t
  misc_feature (1218)..(1218): n is a, c, g, or t
  misc_feature (1236)..(1236): n is a, c, g, or t
  misc_feature (1239)..(1239): n is a, c, g, or t
  misc_feature (1242)..(1242): n is a, c, g, or t
  misc_feature (1245)..(1245): n is a, c, g, or t
  misc_feature (1248)..(1248): n is a, c, g, or t
  misc_feature (1251)..(1251): n is a, c, g, or t
  misc_feature (1254)..(1254): n is a, c, g, or t
  misc_feature (1257)..(1257): n is a, c, g, or t
  misc_feature (1260)..(1260): n is a, c, g, or t
  misc_feature (1263)..(1263): n is a, c, g, or t
  misc_feature (1266)..(1266): n is a, c, g, or t
  misc_feature (1275)..(1275): n is a, c, g, or t
  misc_feature (1278)..(1278): n is a, c, g, or t
  misc_feature (1284)..(1284): n is a, c, g, or t
  misc_feature (1293)..(1293): n is a, c, g, or t
  misc_feature (1296)..(1296): n is a, c, g, or t
  misc_feature (1302)..(1302): n is a, c, g, or t
  misc_feature (1311)..(1311): n is a, c, g, or t
  misc_feature (1317)..(1317): n is a, c, g, or t
  misc_feature (1335)..(1335): n is a, c, g, or t
  misc_feature (1338)..(1338): n is a, c, g, or t
  misc_feature (1341)..(1341): n is a, c, g, or t
  misc_feature (1347)..(1347): n is a, c, g, or t
  misc_feature (1350)..(1350): n is a, c, g, or t
  misc_feature (1353)..(1353): n is a, c, g, or t
  misc_feature (1356)..(1356): n is a, c, g, or t
  misc_feature (1359)..(1359): n is a, c, g, or t
  misc_feature (1365)..(1365): n is a, c, g, or t
  misc_feature (1368)..(1368): n is a, c, g, or t
  misc_feature (1371)..(1371): n is a, c, g, or t
  misc_feature (1374)..(1374): n is a, c, g, or t
  misc_feature (1377)..(1377): n is a, c, g, or t
  misc_feature (1380)..(1380): n is a, c, g, or t
  misc_feature (1383)..(1383): n is a, c, g, or t
  misc_feature (1386)..(1386): n is a, c, g, or t
  misc_feature (1389)..(1389): n is a, c, g, or t
  misc_feature (1392)..(1392): n is a, c, g, or t
  misc_feature (1395)..(1395): n is a, c, g, or t
  misc_feature (1398)..(1398): n is a, c, g, or t
  misc_feature (1401)..(1401): n is a, c, g, or t
  misc_feature (1404)..(1404): n is a, c, g, or t
  misc_feature (1410)..(1410): n is a, c, g, or t
  misc_feature (1413)..(1413): n is a, c, g, or t
  misc_feature (1422)..(1422): n is a, c, g, or t
  misc_feature (1431)..(1431): n is a, c, g, or t
  misc_feature (1437)..(1437): n is a, c, g, or t
  misc_feature (1440)..(1440): n is a, c, g, or t
  misc_feature (1443)..(1443): n is a, c, g, or t
  misc_feature (1446)..(1446): n is a, c, g, or t
  misc_feature (1449)..(1449): n is a, c, g, or t
  misc_feature (1452)..(1452): n is a, c, g, or t
  misc_feature (1458)..(1458): n is a, c, g, or t
  misc_feature (1461)..(1461): n is a, c, g, or t
  misc_feature (1464)..(1464): n is a, c, g, or t
  misc_feature (1467)..(1467): n is a, c, g, or t
  misc_feature (1473)..(1473): n is a, c, g, or t
  misc_feature (1476)..(1476): n is a, c, g, or t
  misc_feature (1479)..(1479): n is a, c, g, or t
  misc_feature (1482)..(1482): n is a, c, g, or t
  misc_feature (1485)..(1485): n is a, c, g, or t
  misc_feature (1488)..(1488): n is a, c, g, or t
  misc_feature (1491)..(1491): n is a, c, g, or t
  misc_feature (1494)..(1494): n is a, c, g, or t
  misc_feature (1500)..(1500): n is a, c, g, or t
  misc_feature (1503)..(1503): n is a, c, g, or t
  misc_feature (1506)..(1506): n is a, c, g, or t
  misc_feature (1512)..(1512): n is a, c, g, or t
  misc_feature (1518)..(1518): n is a, c, g, or t
  misc_feature (1521)..(1521): n is a, c, g, or t
  misc_feature (1530)..(1530): n is a, c, g, or t
  misc_feature (1533)..(1533): n is a, c, g, or t
  misc_feature (1539)..(1539): n is a, c, g, or t
  misc_feature (1542)..(1542): n is a, c, g, or t
  misc_feature (1551)..(1551): n is a, c, g, or t
  misc_feature (1560)..(1560): n is a, c, g, or t
  misc_feature (1566)..(1566): n is a, c, g, or t
  misc_feature (1569)..(1569): n is a, c, g, or t
  misc_feature (1572)..(1572): n is a, c, g, or t
  misc_feature (1575)..(1575): n is a, c, g, or t
  misc_feature (1578)..(1578): n is a, c, g, or t
  misc_feature (1581)..(1581): n is a, c, g, or t
  misc_feature (1584)..(1584): n is a, c, g, or t
  misc_feature (1587)..(1587): n is a, c, g, or t
  misc_feature (1590)..(1590): n is a, c, g, or t
  misc_feature (1593)..(1593): n is a, c, g, or t
  misc_feature (1596)..(1596): n is a, c, g, or t
  misc_feature (1599)..(1599): n is a, c, g, or t
  misc_feature (1602)..(1602): n is a, c, g, or t
  misc_feature (1605)..(1605): n is a, c, g, or t
  misc_feature (1608)..(1608): n is a, c, g, or t
  misc_feature (1611)..(1611): n is a, c, g, or t
  misc_feature (1614)..(1614): n is a, c, g, or t
  misc_feature (1623)..(1623): n is a, c, g, or t
  misc_feature (1626)..(1626): n is a, c, g, or t
  misc_feature (1629)..(1629): n is a, c, g, or t
  misc_feature (1632)..(1632): n is a, c, g, or t
  misc_feature (1635)..(1635): n is a, c, g, or t
  misc_feature (1638)..(1638): n is a, c, g, or t
  misc_feature (1641)..(1641): n is a, c, g, or t
  misc_feature (1644)..(1644): n is a, c, g, or t
  misc_feature (1650)..(1650): n is a, c, g, or t
  misc_feature (1656)..(1656): n is a, c, g, or t
  misc_feature (1659)..(1659): n is a, c, g, or t
  misc_feature (1662)..(1662): n is a, c, g, or t
  misc_feature (1668)..(1668): n is a, c, g, or t
  misc_feature (1677)..(1677): n is a, c, g, or t
  misc_feature (1683)..(1683): n is a, c, g, or t
  misc_feature (1686)..(1686): n is a, c, g, or t
  misc_feature (1689)..(1689): n is a, c, g, or t
  misc_feature (1692)..(1692): n is a, c, g, or t
  misc_feature (1695)..(1695): n is a, c, g, or t
  misc_feature (1701)..(1701): n is a, c, g, or t
  misc_feature (1704)..(1704): n is a, c, g, or t
  misc_feature (1707)..(1707): n is a, c, g, or t
  misc_feature (1710)..(1710): n is a, c, g, or t
  misc_feature (1713)..(1713): n is a, c, g, or t
  misc_feature (1716)..(1716): n is a, c, g, or t
  misc_feature (1719)..(1719): n is a, c, g, or t
  misc_feature (1722)..(1722): n is a, c, g, or t
  misc_feature (1731)..(1731): n is a, c, g, or t
  misc_feature (1734)..(1734): n is a, c, g, or t
  misc_feature (1740)..(1740): n is a, c, g, or t
  misc_feature (1743)..(1743): n is a, c, g, or t
  misc_feature (1746)..(1746): n is a, c, g, or t
  misc_feature (1749)..(1749): n is a, c, g, or t
  misc_feature (1755)..(1755): n is a, c, g, or t
  misc_feature (1758)..(1758): n is a, c, g, or t
  misc_feature (1761)..(1761): n is a, c, g, or t
  misc_feature (1764)..(1764): n is a, c, g, or t
  misc_feature (1767)..(1767): n is a, c, g, or t
  misc_feature (1770)..(1770): n is a, c, g, or t
  misc_feature (1773)..(1773): n is a, c, g, or t
  misc_feature (1782)..(1782): n is a, c, g, or t
  misc_feature (1791)..(1791): n is a, c, g, or t
  misc_feature (1794)..(1794): n is a, c, g, or t
  misc_feature (1797)..(1797): n is a, c, g, or t
  misc_feature (1800)..(1800): n is a, c, g, or t
  misc_feature (1806)..(1806): n is a, c, g, or t
  misc_feature (1809)..(1809): n is a, c, g, or t
  misc_feature (1815)..(1815): n is a, c, g, or t
  misc_feature (1818)..(1818): n is a, c, g, or t
  misc_feature (1824)..(1824): n is a, c, g, or t
  misc_feature (1827)..(1827): n is a, c, g, or t
  misc_feature (1830)..(1830): n is a, c, g, or t
  misc_feature (1836)..(1836): n is a, c, g, or t
  misc_feature (1842)..(1842): n is a, c, g, or t
  misc_feature (1845)..(1845): n is a, c, g, or t
  misc_feature (1851)..(1851): n is a, c, g, or t
  misc_feature (1857)..(1857): n is a, c, g, or t
  misc_feature (1863)..(1863): n is a, c, g, or t
  misc_feature (1866)..(1866): n is a, c, g, or t
  misc_feature (1872)..(1872): n is a, c, g, or t
  misc_feature (1875)..(1875): n is a, c, g, or t
  misc_feature (1878)..(1878): n is a, c, g, or t
  misc_feature (1881)..(1881): n is a, c, g, or t
  misc_feature (1884)..(1884): n is a, c, g, or t
  misc_feature (1890)..(1890): n is a, c, g, or t
  misc_feature (1893)..(1893): n is a, c, g, or t
  misc_feature (1896)..(1896): n is a, c, g, or t
  misc_feature (1902)..(1902): n is a, c, g, or t
  misc_feature (1908)..(1908): n is a, c, g, or t
  misc_feature (1911)..(1911): n is a, c, g, or t
  misc_feature (1914)..(1914): n is a, c, g, or t
  misc_feature (1917)..(1917): n is a, c, g, or t
  misc_feature (1920)..(1920): n is a, c, g, or t
  misc_feature (1926)..(1926): n is a, c, g, or t
  misc_feature (1929)..(1929): n is a, c, g, or t
  misc_feature (1932)..(1932): n is a, c, g, or t
  misc_feature (1935)..(1935): n is a, c, g, or t
  misc_feature (1938)..(1938): n is a, c, g, or t
  misc_feature (1944)..(1944): n is a, c, g, or t
  misc_feature (1947)..(1947): n is a, c, g, or t
  misc_feature (1950)..(1950): n is a, c, g, or t
  misc_feature (1953)..(1953): n is a, c, g, or t
  misc_feature (1956)..(1956): n is a, c, g, or t
  misc_feature (1962)..(1962): n is a, c, g, or t
  misc_feature (1965)..(1965): n is a, c, g, or t
  misc_feature (1968)..(1968): n is a, c, g, or t
  misc_feature (1974)..(1974): n is a, c, g, or t
  misc_feature (1980)..(1980): n is a, c, g, or t
  misc_feature (1983)..(1983): n is a, c, g, or t
  misc_feature (1989)..(1989): n is a, c, g, or t
  misc_feature (1992)..(1992): n is a, c, g, or t
  misc_feature (1998)..(1998): n is a, c, g, or t
  misc_feature (2001)..(2001): n is a, c, g, or t
  misc_feature (2004)..(2004): n is a, c, g, or t
  misc_feature (2007)..(2007): n is a, c, g, or t
  misc_feature (2010)..(2010): n is a, c, g, or t
  misc_feature (2013)..(2013): n is a, c, g, or t
  misc_feature (2016)..(2016): n is a, c, g, or t
  misc_feature (2019)..(2019): n is a, c, g, or t
  misc_feature (2025)..(2025): n is a, c, g, or t
  misc_feature (2031)..(2031): n is a, c, g, or t
  misc_feature (2034)..(2034): n is a, c, g, or t
  misc_feature (2040)..(2040): n is a, c, g, or t
  misc_feature (2043)..(2043): n is a, c, g, or t
  misc_feature (2046)..(2046): n is a, c, g, or t
  misc_feature (2049)..(2049): n is a, c, g, or t
  misc_feature (2052)..(2052): n is a, c, g, or t
  misc_feature (2055)..(2055): n is a, c, g, or t
  misc_feature (2058)..(2058): n is a, c, g, or t
  misc_feature (2061)..(2061): n is a, c, g, or t
  misc_feature (2064)..(2064): n is a, c, g, or t
  misc_feature (2067)..(2067): n is a, c, g, or t
  misc_feature (2070)..(2070): n is a, c, g, or t
  misc_feature (2073)..(2073): n is a, c, g, or t
  misc_feature (2079)..(2079): n is a, c, g, or t
  misc_feature (2082)..(2082): n is a, c, g, or t
  misc_feature (2088)..(2088): n is a, c, g, or t
  misc_feature (2091)..(2091): n is a, c, g, or t
  misc_feature (2094)..(2094): n is a, c, g, or t
  misc_feature (2097)..(2097): n is a, c, g, or t
  misc_feature (2100)..(2100): n is a, c, g, or t
  misc_feature (2103)..(2103): n is a, c, g, or t
  misc_feature (2106)..(2106): n is a, c, g, or t
  misc_feature (2112)..(2112): n is a, c, g, or t
  misc_feature (2115)..(2115): n is a, c, g, or t
  misc_feature (2118)..(2118): n is a, c, g, or t
  misc_feature (2124)..(2124): n is a, c, g, or t
  misc_feature (2130)..(2130): n is a, c, g, or t
  misc_feature (2133)..(2133): n is a, c, g, or t
  misc_feature (2139)..(2139): n is a, c, g, or t
  misc_feature (2142)..(2142): n is a, c, g, or t
  misc_feature (2145)..(2145): n is a, c, g, or t
  misc_feature (2148)..(2148): n is a, c, g, or t
  misc_feature (2151)..(2151): n is a, c, g, or t
  misc_feature (2154)..(2154): n is a, c, g, or t
  misc_feature (2157)..(2157): n is a, c, g, or t
  misc_feature (2160)..(2160): n is a, c, g, or t
  misc_feature (2163)..(2163): n is a, c, g, or t
  misc_feature (2166)..(2166): n is a, c, g, or t
  misc_feature (2169)..(2169): n is a, c, g, or t
  misc_feature (2172)..(2172): n is a, c, g, or t
  misc_feature (2175)..(2175): n is a, c, g, or t
  misc_feature (2184)..(2184): n is a, c, g, or t
  misc_feature (2187)..(2187): n is a, c, g, or t
  misc_feature (2190)..(2190): n is a, c, g, or t
  misc_feature (2193)..(2193): n is a, c, g, or t
  misc_feature (2196)..(2196): n is a, c, g, or t
  misc_feature (2202)..(2202): n is a, c, g, or t
  misc_feature (2208)..(2208): n is a, c, g, or t
  misc_feature (2211)..(2211): n is a, c, g, or t
  misc_feature (2217)..(2217): n is a, c, g, or t
  misc_feature (2220)..(2220): n is a, c, g, or t
  misc_feature (2223)..(2223): n is a, c, g, or t
  misc_feature (2226)..(2226): n is a, c, g, or t
  misc_feature (2229)..(2229): n is a, c, g, or t
  misc_feature (2232)..(2232): n is a, c, g, or t
  misc_feature (2235)..(2235): n is a, c, g, or t
  misc_feature (2238)..(2238): n is a, c, g, or t
  misc_feature (2241)..(2241): n is a, c, g, or t
  misc_feature (2244)..(2244): n is a, c, g, or t
  misc_feature (2247)..(2247): n is a, c, g, or t
  misc_feature (2250)..(2250): n is a, c, g, or t
  misc_feature (2256)..(2256): n is a, c, g, or t
  misc_feature (2259)..(2259): n is a, c, g, or t
  misc_feature (2262)..(2262): n is a, c, g, or t
  misc_feature (2265)..(2265): n is a, c, g, or t
  misc_feature (2268)..(2268): n is a, c, g, or t
  misc_feature (2274)..(2274): n is a, c, g, or t
  misc_feature (2280)..(2280): n is a, c, g, or t
  misc_feature (2283)..(2283): n is a, c, g, or t
  misc_feature (2286)..(2286): n is a, c, g, or t
  misc_feature (2292)..(2292): n is a, c, g, or t
  misc_feature (2298)..(2298): n is a, c, g, or t
  misc_feature (2301)..(2301): n is a, c, g, or t
  misc_feature (2304)..(2304): n is a, c, g, or t
  misc_feature (2310)..(2310): n is a, c, g, or t
  misc_feature (2313)..(2313): n is a, c, g, or t
  misc_feature (2316)..(2316): n is a, c, g, or t
  misc_feature (2319)..(2319): n is a, c, g, or t
  misc_feature (2322)..(2322): n is a, c, g, or t
  misc_feature (2325)..(2325): n is a, c, g, or t
  misc_feature (2328)..(2328): n is a, c, g, or t
  misc_feature (2334)..(2334): n is a, c, g, or t
  misc_feature (2337)..(2337): n is a, c, g, or t
  misc_feature (2343)..(2343): n is a, c, g, or t
  misc_feature (2346)..(2346): n is a, c, g, or t
  misc_feature (2349)..(2349): n is a, c, g, or t
  misc_feature (2352)..(2352): n is a, c, g, or t
  misc_feature (2355)..(2355): n is a, c, g, or t
  misc_feature (2358)..(2358): n is a, c, g, or t
  misc_feature (2361)..(2361): n is a, c, g, or t
  misc_feature (2367)..(2367): n is a, c, g, or t
  misc_feature (2370)..(2370): n is a, c, g, or t
  misc_feature (2373)..(2373): n is a, c, g, or t
  misc_feature (2379)..(2379): n is a, c, g, or t
  misc_feature (2385)..(2385): n is a, c, g, or t
  misc_feature (2388)..(2388): n is a, c, g, or t
  misc_feature (2391)..(2391): n is a, c, g, or t
  misc_feature (2397)..(2397): n is a, c, g, or t
  misc_feature (2403)..(2403): n is a, c, g, or t
  misc_feature (2406)..(2406): n is a, c, g, or t
  misc_feature (2415)..(2415): n is a, c, g, or t
  misc_feature (2421)..(2421): n is a, c, g, or t
  misc_feature (2424)..(2424): n is a, c, g, or t
  misc_feature (2427)..(2427): n is a, c, g, or t
  misc_feature (2430)..(2430): n is a, c, g, or t
  misc_feature (2433)..(2433): n is a, c, g, or t
  misc_feature (2436)..(2436): n is a, c, g, or t
  misc_feature (2442)..(2442): n is a, c, g, or t
  misc_feature (2445)..(2445): n is a, c, g, or t
  misc_feature (2448)..(2448): n is a, c, g, or t
  misc_feature (2451)..(2451): n is a, c, g, or t
  misc_feature (2454)..(2454): n is a, c, g, or t
  misc_feature (2457)..(2457): n is a, c, g, or t
  misc_feature (2463)..(2463): n is a, c, g, or t
  misc_feature (2466)..(2466): n is a, c, g, or t
  misc_feature (2469)..(2469): n is a, c, g, or t
  misc_feature (2472)..(2472): n is a, c, g, or t
  misc_feature (2475)..(2475): n is a, c, g, or t
  misc_feature (2481)..(2481): n is a, c, g, or t
  misc_feature (2484)..(2484): n is a, c, g, or t
  misc_feature (2487)..(2487): n is a, c, g, or t
  misc_feature (2490)..(2490): n is a, c, g, or t
  misc_feature (2493)..(2493): n is a, c, g, or t
  misc_feature (2496)..(2496): n is a, c, g, or t
  misc_feature (2502)..(2502): n is a, c, g, or t
  misc_feature (2505)..(2505): n is a, c, g, or t
  misc_feature (2508)..(2508): n is a, c, g, or t
  misc_feature (2511)..(2511): n is a, c, g, or t
  misc_feature (2514)..(2514): n is a, c, g, or t
  misc_feature (2517)..(2517): n is a, c, g, or t
  misc_feature (2520)..(2520): n is a, c, g, or t
  misc_feature (2523)..(2523): n is a, c, g, or t
  misc_feature (2526)..(2526): n is a, c, g, or t
  misc_feature (2529)..(2529): n is a, c, g, or t
  misc_feature (2535)..(2535): n is a, c, g, or t
  misc_feature (2538)..(2538): n is a, c, g, or t
  misc_feature (2541)..(2541): n is a, c, g, or t
  misc_feature (2544)..(2544): n is a, c, g, or t
  misc_feature (2547)..(2547): n is a, c, g, or t
  misc_feature (2553)..(2553): n is a, c, g, or t
  misc_feature (2556)..(2556): n is a, c, g, or t
  misc_feature (2559)..(2559): n is a, c, g, or t
  misc_feature (2565)..(2565): n is a, c, g, or t
  misc_feature (2574)..(2574): n is a, c, g, or t
  misc_feature (2583)..(2583): n is a, c, g, or t
  misc_feature (2586)..(2586): n is a, c, g, or t
  misc_feature (2589)..(2589): n is a, c, g, or t
  misc_feature (2592)..(2592): n is a, c, g, or t
  misc_feature (2595)..(2595): n is a, c, g, or t
  misc_feature (2598)..(2598): n is a, c, g, or t
  misc_feature (2601)..(2601): n is a, c, g, or t
  misc_feature (2604)..(2604): n is a, c, g, or t
  misc_feature (2607)..(2607): n is a, c, g, or t
  misc_feature (2610)..(2610): n is a, c, g, or t
  misc_feature (2616)..(2616): n is a, c, g, or t
  misc_feature (2619)..(2619): n is a, c, g, or t
  misc_feature (2622)..(2622): n is a, c, g, or t
  misc_feature (2625)..(2625): n is a, c, g, or t
  misc_feature (2628)..(2628): n is a, c, g, or t
  misc_feature (2631)..(2631): n is a, c, g, or t
  misc_feature (2634)..(2634): n is a, c, g, or t
  misc_feature (2637)..(2637): n is a, c, g, or t
  misc_feature (2640)..(2640): n is a, c, g, or t
  misc_feature (2646)..(2646): n is a, c, g, or t
  misc_feature (2655)..(2655): n is a, c, g, or t
  misc_feature (2658)..(2658): n is a, c, g, or t
  misc_feature (2664)..(2664): n is a, c, g, or t
  misc_feature (2670)..(2670): n is a, c, g, or t
  misc_feature (2673)..(2673): n is a, c, g, or t
  misc_feature (2676)..(2676): n is a, c, g, or t
  misc_feature (2679)..(2679): n is a, c, g, or t
  misc_feature (2682)..(2682): n is a, c, g, or t
  misc_feature (2685)..(2685): n is a, c, g, or t
  misc_feature (2688)..(2688): n is a, c, g, or t
  misc_feature (2691)..(2691): n is a, c, g, or t
  misc_feature (2700)..(2700): n is a, c, g, or t
  misc_feature (2703)..(2703): n is a, c, g, or t
  misc_feature (2709)..(2709): n is a, c, g, or t
  misc_feature (2715)..(2715): n is a, c, g, or t
  misc_feature (2718)..(2718): n is a, c, g, or t
  misc_feature (2721)..(2721): n is a, c, g, or t
  misc_feature (2724)..(2724): n is a, c, g, or t
  misc_feature (2727)..(2727): n is a, c, g, or t
  misc_feature (2730)..(2730): n is a, c, g, or t
  misc_feature (2733)..(2733): n is a, c, g, or t
  misc_feature (2736)..(2736): n is a, c, g, or t
  misc_feature (2739)..(2739): n is a, c, g, or t
  misc_feature (2748)..(2748): n is a, c, g, or t
  misc_feature (2754)..(2754): n is a, c, g, or t
  misc_feature (2757)..(2757): n is a, c, g, or t
  misc_feature (2760)..(2760): n is a, c, g, or t
  misc_feature (2763)..(2763): n is a, c, g, or t
  misc_feature (2769)..(2769): n is a, c, g, or t
  misc_feature (2778)..(2778): n is a, c, g, or t
  misc_feature (2784)..(2784): n is a, c, g, or t
  misc_feature (2787)..(2787): n is a, c, g, or t
  misc_feature (2790)..(2790): n is a, c, g, or t
  misc_feature (2793)..(2793): n is a, c, g, or t
  misc_feature (2796)..(2796): n is a, c, g, or t
  misc_feature (2802)..(2802): n is a, c, g, or t
  misc_feature (2805)..(2805): n is a, c, g, or t
  misc_feature (2808)..(2808): n is a, c, g, or t
  misc_feature (2811)..(2811): n is a, c, g, or t
  misc_feature (2814)..(2814): n is a, c, g, or t
  misc_feature (2817)..(2817): n is a, c, g, or t
  misc_feature (2823)..(2823): n is a, c, g, or t
  misc_feature (2832)..(2832): n is a, c, g, or t
  misc_feature (2835)..(2835): n is a, c, g, or t
  misc_feature (2838)..(2838): n is a, c, g, or t
  misc_feature (2841)..(2841): n is a, c, g, or t
  misc_feature (2847)..(2847): n is a, c, g, or t
  misc_feature (2850)..(2850): n is a, c, g, or t
  misc_feature (2856)..(2856): n is a, c, g, or t
  misc_feature (2859)..(2859): n is a, c, g, or t
  misc_feature (2862)..(2862): n is a, c, g, or t
  misc_feature (2865)..(2865): n is a, c, g, or t
  misc_feature (2868)..(2868): n is a, c, g, or t
  misc_feature (2874)..(2874): n is a, c, g, or t
  misc_feature (2877)..(2877): n is a, c, g, or t
  misc_feature (2880)..(2880): n is a, c, g, or t
  misc_feature (2883)..(2883): n is a, c, g, or t
  misc_feature (2886)..(2886): n is a, c, g, or t
  misc_feature (2889)..(2889): n is a, c, g, or t
  misc_feature (2892)..(2892): n is a, c, g, or t
  misc_feature (2895)..(2895): n is a, c, g, or t
  misc_feature (2898)..(2898): n is a, c, g, or t
  misc_feature (2904)..(2904): n is a, c, g, or t
  misc_feature (2910)..(2910): n is a, c, g, or t
  misc_feature (2913)..(2913): n is a, c, g, or t
  misc_feature (2916)..(2916): n is a, c, g, or t
  misc_feature (2919)..(2919): n is a, c, g, or t
  misc_feature (2922)..(2922): n is a, c, g, or t
  misc_feature (2928)..(2928): n is a, c, g, or t
  misc_feature (2931)..(2931): n is a, c, g, or t
  misc_feature (2934)..(2934): n is a, c, g, or t
  misc_feature (2940)..(2940): n is a, c, g, or t
  misc_feature (2943)..(2943): n is a, c, g, or t
  misc_feature (2946)..(2946): n is a, c, g, or t
  misc_feature (2949)..(2949): n is a, c, g, or t
  misc_feature (2952)..(2952): n is a, c, g, or t
  misc_feature (2958)..(2958): n is a, c, g, or t
  misc_feature (2961)..(2961): n is a, c, g, or t
  misc_feature (2967)..(2967): n is a, c, g, or t
  misc_feature (2976)..(2976): n is a, c, g, or t
  misc_feature (2982)..(2982): n is a, c, g, or t
  misc_feature (2985)..(2985): n is a, c, g, or t
  misc_feature (2988)..(2988): n is a, c, g, or t
  misc_feature (2994)..(2994): n is a, c, g, or t
  misc_feature (2997)..(2997): n is a, c, g, or t
  misc_feature (3003)..(3003): n is a, c, g, or t
  misc_feature (3006)..(3006): n is a, c, g, or t
  misc_feature (3009)..(3009): n is a, c, g, or t
  misc_feature (3012)..(3012): n is a, c, g, or t
  misc_feature (3015)..(3015): n is a, c, g, or t
  misc_feature (3018)..(3018): n is a, c, g, or t
  misc_feature (3021)..(3021): n is a, c, g, or t
  misc_feature (3024)..(3024): n is a, c, g, or t
  misc_feature (3027)..(3027): n is a, c, g, or t
  misc_feature (3030)..(3030): n is a, c, g, or t
  misc_feature (3036)..(3036): n is a, c, g, or t
  misc_feature (3039)..(3039): n is a, c, g, or t
  misc_feature (3042)..(3042): n is a, c, g, or t
  misc_feature (3045)..(3045): n is a, c, g, or t
  misc_feature (3048)..(3048): n is a, c, g, or t
  misc_feature (3051)..(3051): n is a, c, g, or t
  misc_feature (3054)..(3054): n is a, c, g, or t
  misc_feature (3057)..(3057): n is a, c, g, or t
  misc_feature (3066)..(3066): n is a, c, g, or t
  misc_feature (3075)..(3075): n is a, c, g, or t
  misc_feature (3081)..(3081): n is a, c, g, or t
  misc_feature (3084)..(3084): n is a, c, g, or t
  misc_feature (3090)..(3090): n is a, c, g, or t
  misc_feature (3093)..(3093): n is a, c, g, or t
  misc_feature (3099)..(3099): n is a, c, g, or t
  misc_feature (3102)..(3102): n is a, c, g, or t
  misc_feature (3105)..(3105): n is a, c, g, or t
  misc_feature (3108)..(3108): n is a, c, g, or t
  misc_feature (3111)..(3111): n is a, c, g, or t
  misc_feature (3114)..(3114): n is a, c, g, or t
  misc_feature (3117)..(3117): n is a, c, g, or t
  misc_feature (3120)..(3120): n is a, c, g, or t
  misc_feature (3126)..(3126): n is a, c, g, or t
  misc_feature (3132)..(3132): n is a, c, g, or t
  misc_feature (3135)..(3135): n is a, c, g, or t
  misc_feature (3138)..(3138): n is a, c, g, or t
  misc_feature (3141)..(3141): n is a, c, g, or t
  misc_feature (3144)..(3144): n is a, c, g, or t
  misc_feature (3150)..(3150): n is a, c, g, or t
  misc_feature (3153)..(3153): n is a, c, g, or t
  misc_feature (3159)..(3159): n is a, c, g, or t
  misc_feature (3162)..(3162): n is a, c, g, or t
  misc_feature (3171)..(3171): n is a, c, g, or t
  misc_feature (3174)..(3174): n is a, c, g, or t
  misc_feature (3177)..(3177): n is a, c, g, or t
  misc_feature (3180)..(3180): n is a, c, g, or t
  misc_feature (3186)..(3186): n is a, c, g, or t
  misc_feature (3189)..(3189): n is a, c, g, or t
  misc_feature (3192)..(3192): n is a, c, g, or t
  misc_feature (3195)..(3195): n is a, c, g, or t
  misc_feature (3198)..(3198): n is a, c, g, or t
  misc_feature (3201)..(3201): n is a, c, g, or t
  misc_feature (3204)..(3204): n is a, c, g, or t
  misc_feature (3207)..(3207): n is a, c, g, or t
  misc_feature (3210)..(3210): n is a, c, g, or t
  misc_feature (3213)..(3213): n is a, c, g, or t
  misc_feature (3216)..(3216): n is a, c, g, or t
  misc_feature (3219)..(3219): n is a, c, g, or t
  misc_feature (3225)..(3225): n is a, c, g, or t
  misc_feature (3231)..(3231): n is a, c, g, or t
  misc_feature (3234)..(3234): n is a, c, g, or t
  misc_feature (3237)..(3237): n is a, c, g, or t
  misc_feature (3240)..(3240): n is a, c, g, or t
  misc_feature (3243)..(3243): n is a, c, g, or t
  misc_feature (3249)..(3249): n is a, c, g, or t
  misc_feature (3252)..(3252): n is a, c, g, or t
  misc_feature (3255)..(3255): n is a, c, g, or t
  misc_feature (3258)..(3258): n is a, c, g, or t
  misc_feature (3261)..(3261): n is a, c, g, or t
  misc_feature (3264)..(3264): n is a, c, g, or t
  misc_feature (3267)..(3267): n is a, c, g, or t
  misc_feature (3270)..(3270): n is a, c, g, or t
  misc_feature (3273)..(3273): n is a, c, g, or t
  misc_feature (3279)..(3279): n is a, c, g, or t
  misc_feature (3285)..(3285): n is a, c, g, or t
  misc_feature (3288)..(3288): n is a, c, g, or t
  misc_feature (3291)..(3291): n is a, c, g, or t
  misc_feature (3294)..(3294): n is a, c, g, or t
  misc_feature (3297)..(3297): n is a, c, g, or t
  misc_feature (3303)..(3303): n is a, c, g, or t
  misc_feature (3306)..(3306): n is a, c, g, or t
  misc_feature (3309)..(3309): n is a, c, g, or t
  misc_feature (3312)..(3312): n is a, c, g, or t
  misc_feature (3315)..(3315): n is a, c, g, or t
  misc_feature (3321)..(3321): n is a, c, g, or t
  misc_feature (3324)..(3324): n is a, c, g, or t
  misc_feature (3327)..(3327): n is a, c, g, or t
  misc_feature (3330)..(3330): n is a, c, g, or t
  misc_feature (3333)..(3333): n is a, c, g, or t
  misc_feature (3336)..(3336): n is a, c, g, or t
  misc_feature (3339)..(3339): n is a, c, g, or t
  misc_feature (3342)..(3342): n is a, c, g, or t
  misc_feature (3348)..(3348): n is a, c, g, or t
  misc_feature (3351)..(3351): n is a, c, g, or t
  misc_feature (3357)..(3357): n is a, c, g, or t
  misc_feature (3360)..(3360): n is a, c, g, or t
  misc_feature (3363)..(3363): n is a, c, g, or t
  misc_feature (3366)..(3366): n is a, c, g, or t
  misc_feature (3369)..(3369): n is a, c, g, or t
  misc_feature (3378)..(3378): n is a, c, g, or t
  misc_feature (3384)..(3384): n is a, c, g, or t
  misc_feature (3387)..(3387): n is a, c, g, or t
  misc_feature (3396)..(3396): n is a, c, g, or t
  misc_feature (3402)..(3402): n is a, c, g, or t
  misc_feature (3405)..(3405): n is a, c, g, or t
  misc_feature (3408)..(3408): n is a, c, g, or t
  misc_feature (3411)..(3411): n is a, c, g, or t
  misc_feature (3414)..(3414): n is a, c, g, or t
  misc_feature (3423)..(3423): n is a, c, g, or t
  misc_feature (3429)..(3429): n is a, c, g, or t
  misc_feature (3432)..(3432): n is a, c, g, or t
  misc_feature (3438)..(3438): n is a, c, g, or t
  misc_feature (3441)..(3441): n is a, c, g, or t
  misc_feature (3447)..(3447): n is a, c, g, or t
  misc_feature (3453)..(3453): n is a, c, g, or t
  misc_feature (3456)..(3456): n is a, c, g, or t
  misc_feature (3459)..(3459): n is a, c, g, or t
  misc_feature (3462)..(3462): n is a, c, g, or t
  misc_feature (3465)..(3465): n is a, c, g, or t
  misc_feature (3468)..(3468): n is a, c, g, or t
  misc_feature (3471)..(3471): n is a, c, g, or t
  misc_feature (3474)..(3474): n is a, c, g, or t
  misc_feature (3477)..(3477): n is a, c, g, or t
  misc_feature (3480)..(3480): n is a, c, g, or t
  misc_feature (3483)..(3483): n is a, c, g, or t
  misc_feature (3492)..(3492): n is a, c, g, or t
  misc_feature (3498)..(3498): n is a, c, g, or t
  misc_feature (3501)..(3501): n is a, c, g, or t
  misc_feature (3504)..(3504): n is a, c, g, or t
  misc_feature (3507)..(3507): n is a, c, g, or t
  misc_feature (3510)..(3510): n is a, c, g, or t
  misc_feature (3516)..(3516): n is a, c, g, or t
  misc_feature (3519)..(3519): n is a, c, g, or t
  misc_feature (3525)..(3525): n is a, c, g, or t
  misc_feature (3528)..(3528): n is a, c, g, or t
  misc_feature (3531)..(3531): n is a, c, g, or t
  misc_feature (3534)..(3534): n is a, c, g, or t
  misc_feature (3537)..(3537): n is a, c, g, or t
  misc_feature (3540)..(3540): n is a, c, g, or t
  misc_feature (3546)..(3546): n is a, c, g, or t
  misc_feature (3552)..(3552): n is a, c, g, or t
  misc_feature (3555)..(3555): n is a, c, g, or t
  misc_feature (3564)..(3564): n is a, c, g, or t
  misc_feature (3570)..(3570): n is a, c, g, or t
  misc_feature (3573)..(3573): n is a, c, g, or t
  misc_feature (3576)..(3576): n is a, c, g, or t
  misc_feature (3582)..(3582): n is a, c, g, or t
  misc_feature (3585)..(3585): n is a, c, g, or t
  misc_feature (3588)..(3588): n is a, c, g, or t
  misc_feature (3591)..(3591): n is a, c, g, or t
  misc_feature (3594)..(3594): n is a, c, g, or t
  misc_feature (3597)..(3597): n is a, c, g, or t
  misc_feature (3600)..(3600): n is a, c, g, or t
  misc_feature (3603)..(3603): n is a, c, g, or t
  misc_feature (3606)..(3606): n is a, c, g, or t
  misc_feature (3609)..(3609): n is a, c, g, or t
  misc_feature (3612)..(3612): n is a, c, g, or t
  misc_feature (3615)..(3615): n is a, c, g, or t
  misc_feature (3618)..(3618): n is a, c, g, or t
  misc_feature (3624)..(3624): n is a, c, g, or t
  misc_feature (3627)..(3627): n is a, c, g, or t
  misc_feature (3633)..(3633): n is a, c, g, or t
  misc_feature (3639)..(3639): n is a, c, g, or t
  misc_feature (3642)..(3642): n is a, c, g, or t
  misc_feature (3645)..(3645): n is a, c, g, or t
  misc_feature (3651)..(3651): n is a, c, g, or t
  misc_feature (3654)..(3654): n is a, c, g, or t
  misc_feature (3657)..(3657): n is a, c, g, or t
  misc_feature (3660)..(3660): n is a, c, g, or t
  misc_feature (3663)..(3663): n is a, c, g, or t
  misc_feature (3666)..(3666): n is a, c, g, or t
  misc_feature (3669)..(3669): n is a, c, g, or t
  misc_feature (3672)..(3672): n is a, c, g, or t
  misc_feature (3675)..(3675): n is a, c, g, or t
  misc_feature (3678)..(3678): n is a, c, g, or t
  misc_feature (3681)..(3681): n is a, c, g, or t
  misc_feature (3687)..(3687): n is a, c, g, or t
  misc_feature (3690)..(3690): n is a, c, g, or t
  misc_feature (3693)..(3693): n is a, c, g, or t
  misc_feature (3696)..(3696): n is a, c, g, or t
  misc_feature (3699)..(3699): n is a, c, g, or t
  misc_feature (3702)..(3702): n is a, c, g, or t
  misc_feature (3705)..(3705): n is a, c, g, or t
  misc_feature (3711)..(3711): n is a, c, g, or t
  misc_feature (3714)..(3714): n is a, c, g, or t
  misc_feature (3723)..(3723): n is a, c, g, or t
  misc_feature (3732)..(3732): n is a, c, g, or t
  misc_feature (3738)..(3738): n is a, c, g, or t
  misc_feature (3741)..(3741): n is a, c, g, or t
  misc_feature (3747)..(3747): n is a, c, g, or t
  misc_feature (3750)..(3750): n is a, c, g, or t
  misc_feature (3753)..(3753): n is a, c, g, or t
  misc_feature (3756)..(3756): n is a, c, g, or t
  misc_feature (3759)..(3759): n is a, c, g, or t
  misc_feature (3762)..(3762): n is a, c, g, or t
  misc_feature (3765)..(3765): n is a, c, g, or t
  misc_feature (3768)..(3768): n is a, c, g, or t
  misc_feature (3771)..(3771): n is a, c, g, or t
  misc_feature (3777)..(3777): n is a, c, g, or t
  misc_feature (3786)..(3786): n is a, c, g, or t
  misc_feature (3789)..(3789): n is a, c, g, or t
  misc_feature (3792)..(3792): n is a, c, g, or t
  misc_feature (3795)..(3795): n is a, c, g, or t
  misc_feature (3798)..(3798): n is a, c, g, or t
  misc_feature (3804)..(3804): n is a, c, g, or t
  misc_feature (3810)..(3810): n is a, c, g, or t
  misc_feature (3813)..(3813): n is a, c, g, or t
  misc_feature (3816)..(3816): n is a, c, g, or t
  misc_feature (3819)..(3819): n is a, c, g, or t
  misc_feature (3822)..(3822): n is a, c, g, or t
  misc_feature (3825)..(3825): n is a, c, g, or t
  misc_feature (3831)..(3831): n is a, c, g, or t
  misc_feature (3840)..(3840): n is a, c, g, or t
  misc_feature (3846)..(3846): n is a, c, g, or t
  misc_feature (3849)..(3849): n is a, c, g, or t
  misc_feature (3852)..(3852): n is a, c, g, or t
  misc_feature (3855)..(3855): n is a, c, g, or t
  misc_feature (3858)..(3858): n is a, c, g, or t
  misc_feature (3861)..(3861): n is a, c, g, or t
  misc_feature (3864)..(3864): n is a, c, g, or t
  misc_feature (3867)..(3867): n is a, c, g, or t
  misc_feature (3873)..(3873): n is a, c, g, or t
  misc_feature (3876)..(3876): n is a, c, g, or t
  misc_feature (3885)..(3885): n is a, c, g, or t
  misc_feature (3888)..(3888): n is a, c, g, or t
  misc_feature (3891)..(3891): n is a, c, g, or t
  misc_feature (3894)..(3894): n is a, c, g, or t
  misc_feature (3897)..(3897): n is a, c, g, or t
  misc_feature (3900)..(3900): n is a, c, g, or t
  misc_feature (3903)..(3903): n is a, c, g, or t
  misc_feature (3906)..(3906): n is a, c, g, or t
  misc_feature (3909)..(3909): n is a, c, g, or t
  misc_feature (3912)..(3912): n is a, c, g, or t
  misc_feature (3915)..(3915): n is a, c, g, or t
  misc_feature (3921)..(3921): n is a, c, g, or t
  misc_feature (3927)..(3927): n is a, c, g, or t
  misc_feature (3930)..(3930): n is a, c, g, or t
  misc_feature (3933)..(3933): n is a, c, g, or t
  misc_feature (3939)..(3939): n is a, c, g, or t
  misc_feature (3942)..(3942): n is a, c, g, or t
  misc_feature (3945)..(3945): n is a, c, g, or t
  misc_feature (3948)..(3948): n is a, c, g, or t
  misc_feature (3951)..(3951): n is a, c, g, or t
  misc_feature (3954)..(3954): n is a, c, g, or t
  misc_feature (3957)..(3957): n is a, c, g, or t
  misc_feature (3960)..(3960): n is a, c, g, or t
  misc_feature (3963)..(3963): n is a, c, g, or t
  misc_feature (3966)..(3966): n is a, c, g, or t
  misc_feature (3969)..(3969): n is a, c, g, or t
  misc_feature (3972)..(3972): n is a, c, g, or t
  misc_feature (3975)..(3975): n is a, c, g, or t
  misc_feature (3981)..(3981): n is a, c, g, or t
  misc_feature (3996)..(3996): n is a, c, g, or t
  misc_feature (4002)..(4002): n is a, c, g, or t
  misc_feature (4005)..(4005): n is a, c, g, or t
  misc_feature (4008)..(4008): n is a, c, g, or t
  misc_feature (4011)..(4011): n is a, c, g, or t
  misc_feature (4014)..(4014): n is a, c, g, or t
  misc_feature (4020)..(4020): n is a, c, g, or t
  misc_feature (4023)..(4023): n is a, c, g, or t
  misc_feature (4029)..(4029): n is a, c, g, or t
  misc_feature (4032)..(4032): n is a, c, g, or t
  misc_feature (4035)..(4035): n is a, c, g, or t
  misc_feature (4041)..(4041): n is a, c, g, or t
  misc_feature (4044)..(4044): n is a, c, g, or t
  misc_feature (4047)..(4047): n is a, c, g, or t
  misc_feature (4050)..(4050): n is a, c, g, or t
  misc_feature (4053)..(4053): n is a, c, g, or t
  misc_feature (4059)..(4059): n is a, c, g, or t
  misc_feature (4062)..(4062): n is a, c, g, or t
  misc_feature (4068)..(4068): n is a, c, g, or t
  misc_feature (4071)..(4071): n is a, c, g, or t
  misc_feature (4074)..(4074): n is a, c, g, or t
  misc_feature (4077)..(4077): n is a, c, g, or t
  misc_feature (4080)..(4080): n is a, c, g, or t
  misc_feature (4083)..(4083): n is a, c, g, or t
  misc_feature (4086)..(4086): n is a, c, g, or t
  misc_feature (4089)..(4089): n is a, c, g, or t
  misc_feature (4092)..(4092): n is a, c, g, or t
  misc_feature (4095)..(4095): n is a, c, g, or t
  misc_feature (4101)..(4101): n is a, c, g, or t
  misc_feature (4104)..(4104): n is a, c, g, or t
  misc_feature (4107)..(4107): n is a, c, g, or t
  misc_feature (4113)..(4113): n is a, c, g, or t
  misc_feature (4116)..(4116): n is a, c, g, or t
  misc_feature (4119)..(4119): n is a, c, g, or t
  misc_feature (4122)..(4122): n is a, c, g, or t
  misc_feature (4131)..(4131): n is a, c, g, or t
  misc_feature (4134)..(4134): n is a, c, g, or t
  misc_feature (4137)..(4137): n is a, c, g, or t
  misc_feature (4140)..(4140): n is a, c, g, or t
  misc_feature (4143)..(4143): n is a, c, g, or t
  misc_feature (4149)..(4149): n is a, c, g, or t
  misc_feature (4155)..(4155): n is a, c, g, or t
  misc_feature (4158)..(4158): n is a, c, g, or t
  misc_feature (4161)..(4161): n is a, c, g, or t
  misc_feature (4164)..(4164): n is a, c, g, or t
  misc_feature (4167)..(4167): n is a, c, g, or t
  misc_feature (4173)..(4173): n is a, c, g, or t
  misc_feature (4176)..(4176): n is a, c, g, or t
  misc_feature (4179)..(4179): n is a, c, g, or t
  misc_feature (4182)..(4182): n is a, c, g, or t
  misc_feature (4185)..(4185): n is a, c, g, or t
  misc_feature (4188)..(4188): n is a, c, g, or t
  misc_feature (4194)..(4194): n is a, c, g, or t
  misc_feature (4197)..(4197): n is a, c, g, or t
  misc_feature (4200)..(4200): n is a, c, g, or t
  misc_feature (4203)..(4203): n is a, c, g, or t
  misc_feature (4206)..(4206): n is a, c, g, or t
  misc_feature (4212)..(4212): n is a, c, g, or t
  misc_feature (4215)..(4215): n is a, c, g, or t
  misc_feature (4221)..(4221): n is a, c, g, or t
  misc_feature (4224)..(4224): n is a, c, g, or t
  misc_feature (4227)..(4227): n is a, c, g, or t
  misc_feature (4230)..(4230): n is a, c, g, or t
  misc_feature (4233)..(4233): n is a, c, g, or t
  misc_feature (4236)..(4236): n is a, c, g, or t
  misc_feature (4239)..(4239): n is a, c, g, or t
  misc_feature (4242)..(4242): n is a, c, g, or t
  misc_feature (4245)..(4245): n is a, c, g, or t
ggnathaarggngaraarggngarmgnggnttyccnggnytngarggncayccnggnytnccnggnttyccnggnccngarggnccnccnggnccnmgnggncaraarggngaygayggnathccnggnccnccnggnccnaarggnathmgnggnccnccnggnytnccnggnttyccnggnacnccnggnytnccnggnatgccnggncaygayggngcnccnggnccncarggnathccnggntgyaayggnacnaarggngarmgnggnttyccnggnwsnccnggnttyccnggnytncarggnccnccnggnccnccnggnathccnggnatgaarggngarccnggnwsnathathatgwsnwsnytnccnggnccnaarggnaayccnggntayccnggnccnccnggnathcarggnytnccnggnccnacnggnathccnggnccnathggnccnccnggnccnccnggnytnatgggnccnccnggnccnccnggnytnccnggnccnaarggnaayatgggnytnaayttycarggnccnaarggngaraarggngarcarggnytncarggnccnccnggnccnccnggncarathwsngarcaraarmgnccnathgaygtngarttycaraarggngaycarggnytnccnggngaymgnggnccnccnggnccnccnggnathmgnggnccnccnggnccnccnggnggngaraarggngaraarggngarcarggngarccnggnaarmgnggnaarccnggnaargayggngaraayggncarccnggnathccnggnytnccnggngayccnggntayccnggngarccnggnmgngayggngaraarggncaraarggngayacnggnccnccnggnccnccnggnytngtnathccnmgnccnggnacnggnathacnathggngaraarggnaayathggnytnccnggnytnccnggngaraarggngarmgnggnttyccnggnathcarggnccnccnggnytnccnggnccnccnggngcngcngtnatgggnccnccnggnccnccnggnttyccnggngarmgnggncaraarggngaygarggnccnccnggnathwsnathccnggnccnccnggnytngayggncarccnggngcnccnggnytnccnggnccnccnggnccngcnggnccncayathccnccnwsngaygarathtgygarccnggnccnccnggnccnccnggnwsnccnggngayaarggnytncarggngarcarggngtnaarggngayaarggngayacntgyttyaaytgyathggnacnggnathwsnggnccnccnggncarccnggnytnccnggnytnccnggnccnccnggnwsnytnggnttyccnggncaraarggngaraarggncargcnggngcnacnggnccnaarggnytnccnggnathccnggngcnccnggngcnccnggnttyccnggnwsnaarggngarccnggngayathytnacnttyccnggnatgaarggngayaarggngarytnggnwsnccnggngcnccnggnytnccnggnytnccnggnacnccnggncargayggnytnccnggnytnccnggnccnaarggngarccnggnggnathacnttyaarggngarmgnggnccnccnggnaayccnggnytnccnggnytnccnggnaayathggnccnatgggnccnccnggnttyggnccnccnggnccngtnggngaraarggnathcarggngtngcnggnaayccnggncarccnggnathccnggnccnaarggngayccnggncaracnathacncarccnggnaarccnggnytnccnggnaayccnggnmgngayggngaygtnggnytnccnggngayccnggnytnccnggncarccnggnytnccnggnathccnggnwsnaarggngarccnggnathccnggnathggnytnccnggnccnccnggnccnaarggnttyccnggnathccnggnccnccnggngcnccnggnacnccnggnmgnathggnytngarggnccnccnggnccnccnggnttyccnggnccnaarggngarccnggnttygcnytnccnggnccnccnggnccnccnggnytnccnggnttyaarggngcnytnggnccnaarggngaymgnggnttyccnggnccnccnggnccnccnggnmgnacnggnytngayggnytnccnggnccnaarggngaygtnggnccnaayggncarccnggnccnatgggnccnccnggnytnccnggnathggngtncarggnccnccnggnccnccnggnathccnggnccnathggncarccnggnytncayggnathccnggngaraarggngayccnggnccnccnggnytngaygtnccnggnccnccnggngarmgnggnwsnccnggnathccnggngcnccnggnccnathggnccnccnggnwsnccnggnytnccnggnaargcnggngcnwsnggnttyccnggnacnaarggngaratgggnatgatgggnccnccnggnccnccnggnccnytnggnathccnggnmgnwsnggngtnccnggnytnaarggngaygayggnytncarggncarccnggnytnccnggnccnacnggngaraarggnwsnaarggngarccnggnytnccnggnccnccnggnccnatggayccnaayytnytnggnwsnaarggngaraarggngarccnggnytnccnggnathccnggngtnwsnggnccnaarggntaycarggnytnccnggngayccnggncarccnggnytnwsnggncarccnggnytnccnggnccnccnggnccnaarggnaayccnggnytnccnggncarccnggnytnathggnccnccnggnytnaarggnacnathggngayatgggnttyccnggnccncarggngtngarggnccnccnggnccnwsnggngtnccnggncarccnggnwsnccnggnytnccnggncaraarggngayaarggngayccnggnathwsnwsnathggnytnccnggnytnccnggnccnaarggngarccnggnytnccnggntayccnggnaayccnggnathaarggnwsngtnggngayccnggnytnccnggnytnccnggnacnccnggngcnaarggncarccnggnytnccnggnttyccnggnacnccnggnccnccnggnccnaarggnathwsnggnccnccnggnaayccnggnytnccnggngarccnggnccngtnggnggnggnggncayccnggncarccnggnccnccnggngaraarggnaarccnggncargayggnathccnggnccngcnggncaraarggngarccnggncarccnggnttyggnaayccnggnccnccnggnytnccnggnytnwsnggncaraarggngayggnggnytnccnggnathccnggnaayccnggnytnccnggnccnaarggngarccnggnttycayggnttyccnggngtncarggnccnccnggnccnccnggnwsnccnggnccngcnytngarggnccnaarggnaayccnggnccncarggnccnccnggnmgnccnggnytnccnggnccngarggnccnccnggnytnccnggnaayggnggnathaarggngaraarggnaayccnggncarccnggnytnccnggnytnccnggnytnaarggngaycarggnccnccnggnytncarggnaayccnggnmgnccnggnytnaayggnatgaarggngayccnggnytnccnggngtnccnggnttyccnggnatgaarggnccnwsnggngtnccnggnwsngcnggnccngarggngarccnggnytnathggnccnccnggnccnccnggnytnccnggnccnwsnggncarwsnathathathaarggngaygcnggnccnccnggnathccnggncarccnggnytnaarggnytnccnggnccncarggnccncarggnytnccnggnccnacnggnccnccnggngayccnggnmgnaayggnytnccnggnttygayggngcnggnggnmgnaarggngayccnggnytnccnggncarccnggnacnmgnggnytngayggnccnccnggnccngayggnytncarggnccnccnggnccnccnggnacnwsn

SEQ ID NO: 1105 - DNA, 4251 bp, Artificial Sequence
  hCol-CNA10 (alpha6(IV) THD)
  misc_feature (3)..(3): n is a, c, g, or t
  misc_feature (6)..(6): n is a, c, g, or t
  misc_feature (9)..(9): n is a, c, g, or t
  misc_feature (12)..(12): n is a, c, g, or t
  misc_feature (15)..(15): n is a, c, g, or t
  misc_feature (18)..(18): n is a, c, g, or t
  misc_feature (21)..(21): n is a, c, g, or t
  misc_feature (24)..(24): n is a, c, g, or t
  misc_feature (30)..(30): n is a, c, g, or t
  misc_feature (39)..(39): n is a, c, g, or t
  misc_feature (42)..(42): n is a, c, g, or t
  misc_feature (45)..(45): n is a, c, g, or t
  misc_feature (48)..(48): n is a, c, g, or t
  misc_feature (51)..(51): n is a, c, g, or t
  misc_feature (57)..(57): n is a, c, g, or t
  misc_feature (63)..(63): n is a, c, g, or t
  misc_feature (66)..(66): n is a, c, g, or t
  misc_feature (69)..(69): n is a, c, g, or t
  misc_feature (72)..(72): n is a, c, g, or t
  misc_feature (75)..(75): n is a, c, g, or t
  misc_feature (78)..(78): n is a, c, g, or t
  misc_feature (81)..(81): n is a, c, g, or t
  misc_feature (84)..(84): n is a, c, g, or t
  misc_feature (87)..(87): n is a, c, g, or t
  misc_feature (93)..(93): n is a, c, g, or t
  misc_feature (99)..(99): n is a, c, g, or t
  misc_feature (102)..(102): n is a, c, g, or t
  misc_feature (108)..(108): n is a, c, g, or t
  misc_feature (111)..(111): n is a, c, g, or t
  misc_feature (114)..(114): n is a, c, g, or t
  misc_feature (117)..(117): n is a, c, g, or t
  misc_feature (120)..(120): n is a, c, g, or t
  misc_feature (123)..(123): n is a, c, g, or t
  misc_feature (129)..(129): n is a, c, g, or t
  misc_feature (132)..(132): n is a, c, g, or t
  misc_feature (138)..(138): n is a, c, g, or t
  misc_feature (147)..(147): n is a, c, g, or t
  misc_feature (150)..(150): n is a, c, g, or t
  misc_feature (156)..(156): n is a, c, g, or t
  misc_feature (159)..(159): n is a, c, g, or t
  misc_feature (162)..(162): n is a, c, g, or t
  misc_feature (165)..(165): n is a, c, g, or t
  misc_feature (171)..(171): n is a, c, g, or t
  misc_feature (174)..(174): n is a, c, g, or t
  misc_feature (183)..(183): n is a, c, g, or t
  misc_feature (189)..(189): n is a, c, g, or t
  misc_feature (192)..(192): n is a, c, g, or t
  misc_feature (198)..(198): n is a, c, g, or t
  misc_feature (201)..(201): n is a, c, g, or t
  misc_feature (207)..(207): n is a, c, g, or t
  misc_feature (210)..(210): n is a, c, g, or t
  misc_feature (213)..(213): n is a, c, g, or t
  misc_feature (216)..(216): n is a, c, g, or t
  misc_feature (219)..(219): n is a, c, g, or t
  misc_feature (222)..(222): n is a, c, g, or t
  misc_feature (225)..(225): n is a, c, g, or t
  misc_feature (228)..(228): n is a, c, g, or t
  misc_feature (231)..(231): n is a, c, g, or t
  misc_feature (237)..(237): n is a, c, g, or t
  misc_feature (246)..(246): n is a, c, g, or t
  misc_feature (249)..(249): n is a, c, g, or t
  misc_feature (255)..(255): n is a, c, g, or t
  misc_feature (258)..(258): n is a, c, g, or t
  misc_feature (261)..(261): n is a, c, g, or t
  misc_feature (264)..(264): n is a, c, g, or t
  misc_feature (270)..(270): n is a, c, g, or t
  misc_feature (273)..(273): n is a, c, g, or t
  misc_feature (276)..(276): n is a, c, g, or t
  misc_feature (282)..(282): n is a, c, g, or t
  misc_feature (288)..(288): n is a, c, g, or t
  misc_feature (291)..(291): n is a, c, g, or t
  misc_feature (294)..(294): n is a, c, g, or t
  misc_feature (297)..(297): n is a, c, g, or t
  misc_feature (300)..(300): n is a, c, g, or t
  misc_feature (303)..(303): n is a, c, g, or t
  misc_feature (306)..(306): n is a, c, g, or t
  misc_feature (309)..(309): n is a, c, g, or t
  misc_feature (312)..(312): n is a, c, g, or t
  misc_feature (315)..(315): n is a, c, g, or t
  misc_feature (318)..(318): n is a, c, g, or t
  misc_feature (327)..(327): n is a, c, g, or t
  misc_feature (330)..(330): n is a, c, g, or t
  misc_feature (336)..(336): n is a, c, g, or t
  misc_feature (342)..(342): n is a, c, g, or t
  misc_feature (345)..(345): n is a, c, g, or t
  misc_feature (348)..(348): n is a, c, g, or t
  misc_feature (351)..(351): n is a, c, g, or t
  misc_feature (354)..(354): n is a, c, g, or t
  misc_feature (357)..(357): n is a, c, g, or t
  misc_feature (360)..(360): n is a, c, g, or t
  misc_feature (369)..(369): n is a, c, g, or t
  misc_feature (378)..(378): n is a, c, g, or t
  misc_feature (384)..(384): n is a, c, g, or t
  misc_feature (387)..(387): n is a, c, g, or t
  misc_feature (390)..(390): n is a, c, g, or t
  misc_feature (393)..(393): n is a, c, g, or t
  misc_feature (396)..(396): n is a, c, g, or t
  misc_feature (399)..(399): n is a, c, g, or t
  misc_feature (405)..(405): n is a, c, g, or t
  misc_feature (411)..(411): n is a, c, g, or t
  misc_feature (414)..(414): n is a, c, g, or t
  misc_feature (417)..(417): n is a, c, g, or t
  misc_feature (423)..(423): n is a, c, g, or t
  misc_feature (426)..(426): n is a, c, g, or t
  misc_feature (429)..(429): n is a, c, g, or t
  misc_feature (432)..(432): n is a, c, g, or t
  misc_feature (438)..(438): n is a, c, g, or t
  misc_feature (441)..(441): n is a, c, g, or t
  misc_feature (444)..(444): n is a, c, g, or t
  misc_feature (447)..(447): n is a, c, g, or t
  misc_feature (450)..(450): n is a, c, g, or t
  misc_feature (453)..(453): n is a, c, g, or t
  misc_feature (456)..(456): n is a, c, g, or t
  misc_feature (459)..(459): n is a, c, g, or t
  misc_feature (462)..(462): n is a, c, g, or t
  misc_feature (465)..(465): n is a, c, g, or t
  misc_feature (468)..(468): n is a, c, g, or t
  misc_feature (471)..(471): n is a, c, g, or t
  misc_feature (477)..(477): n is a, c, g, or t
  misc_feature (480)..(480): n is a, c, g, or t
  misc_feature (483)..(483): n is a, c, g, or t
  misc_feature (486)..(486): n is a, c, g, or t
  misc_feature (489)..(489): n is a, c, g, or t
  misc_feature (492)..(492): n is a, c, g, or t
  misc_feature (495)..(495): n is a, c, g, or t
  misc_feature (498)..(498): n is a, c, g, or t
  misc_feature (501)..(501): n is a, c, g, or t
  misc_feature (504)..(504): n is a, c, g, or t
  misc_feature (507)..(507): n is a, c, g, or t
  misc_feature (513)..(513): n is a, c, g, or t
  misc_feature (522)..(522): n is a, c, g, or t
  misc_feature (525)..(525): n is a, c, g, or t
  misc_feature (528)..(528): n is a, c, g, or t
  misc_feature (537)..(537): n is a, c, g, or t
  misc_feature (546)..(546): n is a, c, g, or t
  misc_feature (549)..(549): n is a, c, g, or t
  misc_feature (555)..(555): n is a, c, g, or t
  misc_feature (561)..(561): n is a, c, g, or t
  misc_feature (564)..(564): n is a, c, g, or t
  misc_feature (567)..(567): n is a, c, g, or t
  misc_feature (570)..(570): n is a, c, g, or t
  misc_feature (573)..(573): n is a, c, g, or t
  misc_feature (576)..(576): n is a, c, g, or t
  misc_feature (579)..(579): n is a, c, g, or t
  misc_feature (582)..(582): n is a, c, g, or t
  misc_feature (585)..(585): n is a, c, g, or t
  misc_feature (588)..(588): n is a, c, g, or t
  misc_feature (591)..(591): n is a, c, g, or t
  misc_feature (594)..(594): n is a, c, g, or t
  misc_feature (597)..(597): n is a, c, g, or t
  misc_feature (600)..(600): n is a, c, g, or t
  misc_feature (606)..(606): n is a, c, g, or t
  misc_feature (618)..(618): n is a, c, g, or t
  misc_feature (624)..(624): n is a, c, g, or t
  misc_feature (630)..(630): n is a, c, g, or t
  misc_feature (639)..(639): n is a, c, g, or t
  misc_feature (642)..(642): n is a, c, g, or t
  misc_feature (648)..(648): n is a, c, g, or t
  misc_feature (654)..(654): n is a, c, g, or t
  misc_feature (657)..(657): n is a, c, g, or t
  misc_feature (660)..(660): n is a, c, g, or t
  misc_feature (666)..(666): n is a, c, g, or t
  misc_feature (672)..(672): n is a, c, g, or t
  misc_feature (675)..(675): n is a, c, g, or t
  misc_feature (681)..(681): n is a, c, g, or t
  misc_feature (684)..(684): n is a, c, g, or t
  misc_feature (687)..(687): n is a, c, g, or t
  misc_feature (690)..(690): n is a, c, g, or t
  misc_feature (693)..(693): n is a, c, g, or t
  misc_feature (699)..(699): n is a, c, g, or t
  misc_feature (702)..(702): n is a, c, g, or t
  misc_feature (705)..(705): n is a, c, g, or t
  misc_feature (708)..(708): n is a, c, g, or t
  misc_feature (711)..(711): n is a, c, g, or t
  misc_feature (714)..(714): n is a, c, g, or t
  misc_feature (717)..(717): n is a, c, g, or t
  misc_feature (726)..(726): n is a, c, g, or t
  misc_feature (735)..(735): n is a, c, g, or t
  misc_feature (744)..(744): n is a, c, g, or t
  misc_feature (750)..(750): n is a, c, g, or t
  misc_feature (753)..(753): n is a, c, g, or t
  misc_feature (756)..(756): n is a, c, g, or t
  misc_feature (759)..(759): n is a, c, g, or t
  misc_feature (762)..(762): n is a, c, g, or t
  misc_feature (765)..(765): n is a, c, g, or t
  misc_feature (768)..(768): n is a, c, g, or t
  misc_feature (771)..(771): n is a, c, g, or t
  misc_feature (774)..(774): n is a, c, g, or t
  misc_feature (780)..(780): n is a, c, g, or t
  misc_feature (783)..(783): n is a, c, g, or t
  misc_feature (789)..(789): n is a, c, g, or t
  misc_feature (792)..(792): n is a, c, g, or t
  misc_feature (798)..(798): n is a, c, g, or t
  misc_feature (801)..(801): n is a, c, g, or t
  misc_feature (804)..(804): n is a, c, g, or t
  misc_feature (807)..(807): n is a, c, g, or t
  misc_feature (816)..(816): n is a, c, g, or t
  misc_feature (825)..(825): n is a, c, g, or t
  misc_feature (828)..(828): n is a, c, g, or t
  misc_feature (831)..(831): n is a, c, g, or t
  misc_feature (834)..(834): n is a, c, g, or t
  misc_feature (840)..(840): n is a, c, g, or t
  misc_feature (843)..(843): n is a, c, g, or t
  misc_feature (846)..(846): n is a, c, g, or t
  misc_feature (852)..(852): n is a, c, g, or t
  misc_feature (861)..(861): n is a, c, g, or t
  misc_feature (870)..(870): n is a, c, g, or t
  misc_feature (879)..(879): n is a, c, g, or t
  misc_feature (888)..(888): n is a, c, g, or t
  misc_feature (891)..(891): n is a, c, g, or t
  misc_feature (894)..(894): n is a, c, g, or t
  misc_feature (897)..(897): n is a, c, g, or t
  misc_feature (900)..(900): n is a, c, g, or t
  misc_feature (906)..(906): n is a, c, g, or t
  misc_feature (924)..(924): n is a, c, g, or t
  misc_feature (927)..(927): n is a, c, g, or t
  misc_feature (930)..(930): n is a, c, g, or t
  misc_feature (936)..(936): n is a, c, g, or t
  misc_feature (939)..(939): n is a, c, g, or t
  misc_feature (945)..(945): n is a, c, g, or t
  misc_feature (948)..(948): n is a, c, g, or t
  misc_feature (954)..(954): n is a, c, g, or t
  misc_feature (957)..(957): n is a, c, g, or t
  misc_feature (960)..(960): n is a, c, g, or t
  misc_feature (963)..(963): n is a, c, g, or t
  misc_feature (966)..(966): n is a, c, g, or t
  misc_feature (969)..(969): n is a, c, g, or t
  misc_feature (972)..(972): n is a, c, g, or t
  misc_feature (975)..(975): n is a, c, g, or t
  misc_feature (978)..(978): n is a, c, g, or t
  misc_feature (984)..(984): n is a, c, g, or t
  misc_feature (993)..(993): n is a, c, g, or t
  misc_feature (1002)..(1002): n is a, c, g, or t
  misc_feature (1005)..(1005): n is a, c, g, or t
  misc_feature (1008)..(1008): n is a, c, g, or t
  misc_feature (1011)..(1011): n is a, c, g, or t
  misc_feature (1014)..(1014): n is a, c, g, or t
  misc_feature (1017)..(1017): n is a, c, g, or t
  misc_feature (1020)..(1020): n is a, c, g, or t
  misc_feature (1023)..(1023): n is a, c, g, or t
  misc_feature (1026)..(1026): n is a, c, g, or t
  misc_feature (1029)..(1029): n is a, c, g, or t
  misc_feature (1032)..(1032): n is a, c, g, or t
  misc_feature (1035)..(1035): n is a, c, g, or t
  misc_feature (1038)..(1038): n is a, c, g, or t
  misc_feature (1041)..(1041): n is a, c, g, or t
  misc_feature (1044)..(1044): n is a, c, g, or t
  misc_feature (1047)..(1047): n is a, c, g, or t
  misc_feature (1050)..(1050): n is a, c, g, or t
  misc_feature (1053)..(1053): n is a, c, g, or t
  misc_feature (1056)..(1056): n is a, c, g, or t
  misc_feature (1059)..(1059): n is a, c, g, or t
  misc_feature (1062)..(1062): n is a, c, g, or t
  misc_feature (1065)..(1065): n is a, c, g, or t
  misc_feature (1068)..(1068): n is a, c, g, or t
  misc_feature (1074)..(1074): n is a, c, g, or t
  misc_feature (1080)..(1080): n is a, c, g, or t
  misc_feature (1083)..(1083): n is a, c, g, or t
  misc_feature (1086)..(1086): n is a, c, g, or t
  misc_feature (1092)..(1092): n is a, c, g, or t
  misc_feature (1101)..(1101): n is a, c, g, or t
  misc_feature (1107)..(1107): n is a, c, g, or t
  misc_feature (1110)..(1110): n is a, c, g, or t
  misc_feature (1113)..(1113): n is a, c, g, or t
  misc_feature (1116)..(1116): n is a, c, g, or t
  misc_feature (1119)..(1119): n is a, c, g, or t
  misc_feature (1125)..(1125): n is a, c, g, or t
  misc_feature (1128)..(1128): n is a, c, g, or t
  misc_feature (1131)..(1131): n is a, c, g, or t
  misc_feature (1134)..(1134): n is a, c, g, or t
  misc_feature (1137)..(1137): n is a, c, g, or t
  misc_feature (1140)..(1140): n is a, c, g, or t
  misc_feature (1143)..(1143): n is a, c, g, or t
  misc_feature (1146)..(1146): n is a, c, g, or t
  misc_feature (1152)..(1152): n is a, c, g, or t
  misc_feature (1155)..(1155): n is a, c, g, or t
  misc_feature (1158)..(1158): n is a, c, g, or t
  misc_feature (1161)..(1161): n is a, c, g, or t
  misc_feature (1164)..(1164): n is a, c, g, or t
  misc_feature (1167)..(1167): n is a, c, g, or t
  misc_feature (1170)..(1170): n is a, c, g, or t
  misc_feature (1173)..(1173): n is a, c, g, or t
  misc_feature (1176)..(1176): n is a, c, g, or t
  misc_feature (1179)..(1179): n is a, c, g, or t
  misc_feature (1182)..(1182): n is a, c, g, or t
  misc_feature (1185)..(1185): n is a, c, g, or t
  misc_feature (1188)..(1188): n is a, c, g, or t
  misc_feature (1191)..(1191): n is a, c, g, or t
  misc_feature (1203)..(1203): n is a, c, g, or t
  misc_feature (1209)..(1209): n is a, c, g, or t
  misc_feature (1212)..(1212): n is a, c, g, or t
  misc_feature (1227)..(1227): n is a, c, g, or t
  misc_feature (1230)..(1230): n is a, c, g, or t
  misc_feature (1236)..(1236): n is a, c, g, or t
  misc_feature (1239)..(1239): n is a, c, g, or t
  misc_feature (1242)..(1242): n is a, c, g, or t
  misc_feature (1245)..(1245): n is a, c, g, or t
  misc_feature (1248)..(1248): n is a, c, g, or t
  misc_feature (1257)..(1257): n is a, c, g, or t
  misc_feature (1260)..(1260): n is a, c, g, or t
  misc_feature (1266)..(1266): n is a, c, g, or t
  misc_feature (1272)..(1272): n is a, c, g, or t
  misc_feature (1275)..(1275): n is a, c, g, or t
  misc_feature (1278)..(1278): n is a, c, g, or t
  misc_feature (1284)..(1284): n is a, c, g, or t
  misc_feature (1293)..(1293): n is a, c, g, or t
  misc_feature (1299)..(1299): n is a, c, g, or t
  misc_feature (1302)..(1302): n is a, c, g, or t
  misc_feature (1311)..(1311): n is a, c, g, or t
  misc_feature (1320)..(1320): n is a, c, g, or t
  misc_feature (1323)..(1323): n is a, c, g, or t
  misc_feature (1326)..(1326): n is a, c, g, or t
  misc_feature (1329)..(1329): n is a, c, g, or t
  misc_feature (1335)..(1335): n is a, c, g, or t
  misc_feature (1338)..(1338): n is a, c, g, or t
  misc_feature (1341)..(1341): n is a, c, g, or t
  misc_feature (1344)..(1344): n is a, c, g, or t
  misc_feature (1347)..(1347): n is a, c, g, or t
  misc_feature (1353)..(1353): n is a, c, g, or t
  misc_feature (1356)..(1356): n is a, c, g, or t
  misc_feature (1359)..(1359): n is a, c, g, or t
  misc_feature (1362)..(1362): n is a, c, g, or t
  misc_feature (1365)..(1365): n is a, c, g, or t
  misc_feature (1368)..(1368): n is a, c, g, or t
  misc_feature (1374)..(1374): n is a, c, g, or t
  misc_feature (1377)..(1377): n is a, c, g, or t
  misc_feature (1383)..(1383): n is a, c, g, or t
  misc_feature (1386)..(1386): n is a, c, g, or t
  misc_feature (1389)..(1389): n is a, c, g, or t
  misc_feature (1392)..(1392): n is a, c, g, or t
  misc_feature (1395)..(1395): n is a, c, g, or t
  misc_feature (1401)..(1401): n is a, c, g, or t
  misc_feature (1404)..(1404): n is a, c, g, or t
  misc_feature (1407)..(1407): n is a, c, g, or t
  misc_feature (1410)..(1410): n is a, c, g, or t
  misc_feature (1416)..(1416): n is a, c, g, or t
  misc_feature (1419)..(1419): n is a, c, g, or t
  misc_feature (1422)..(1422): n is a, c, g, or t
  misc_feature (1425)..(1425): n is a, c, g, or t
  misc_feature (1428)..(1428): n is a, c, g, or t
  misc_feature (1431)..(1431): n is a, c, g, or t
  misc_feature (1437)..(1437): n is a, c, g, or t
  misc_feature (1440)..(1440): n is a, c, g, or t
  misc_feature (1443)..(1443): n is a, c, g, or t
  misc_feature (1446)..(1446): n is a, c, g, or t
  misc_feature (1449)..(1449): n is a, c, g, or t
  misc_feature (1452)..(1452): n is a, c, g, or t
  misc_feature (1455)..(1455): n is a, c, g, or t
  misc_feature (1458)..(1458): n is a, c, g, or t
  misc_feature (1461)..(1461): n is a, c, g, or t
  misc_feature (1464)..(1464): n is a, c, g, or t
  misc_feature (1467)..(1467): n is a, c, g, or t
  misc_feature (1470)..(1470): n is a, c, g, or t
  misc_feature (1473)..(1473): n is a, c, g, or t
  misc_feature (1476)..(1476): n is a, c, g, or t
  misc_feature (1479)..(1479): n is a, c, g, or t
  misc_feature (1482)..(1482): n is a, c, g, or t
  misc_feature (1485)..(1485): n is a, c, g, or t
  misc_feature (1491)..(1491): n is a, c, g, or t
  misc_feature (1500)..(1500): n is a, c, g, or t
  misc_feature (1506)..(1506): n is a, c, g, or t
  misc_feature (1512)..(1512): n is a, c, g, or t
  misc_feature (1515)..(1515): n is a, c, g, or t
  misc_feature (1518)..(1518): n is a, c, g, or t
  misc_feature (1527)..(1527): n is a, c, g, or t
  misc_feature (1533)..(1533): n is a, c, g, or t
  misc_feature (1536)..(1536): n is a, c, g, or t
  misc_feature (1542)..(1542): n is a, c, g, or t
  misc_feature (1545)..(1545): n is a, c, g, or t
  misc_feature (1551)..(1551): n is a, c, g, or t
  misc_feature (1554)..(1554): n is a, c, g, or t
  misc_feature (1557)..(1557): n is a, c, g, or t
  misc_feature (1563)..(1563): n is a, c, g, or t
  misc_feature (1569)..(1569): n is a, c, g, or t
  misc_feature (1572)..(1572): n is a, c, g, or t
  misc_feature (1575)..(1575): n is a, c, g, or t
  misc_feature (1581)..(1581): n is a, c, g, or t
  misc_feature (1587)..(1587): n is a, c, g, or t
  misc_feature (1590)..(1590): n is a, c, g, or t
  misc_feature (1599)..(1599): n is a, c, g, or t
  misc_feature (1602)..(1602): n is a, c, g, or t
  misc_feature (1605)..(1605): n is a, c, g, or t
  misc_feature (1608)..(1608): n is a, c, g, or t
  misc_feature (1611)..(1611): n is a, c, g, or t
  misc_feature (1614)..(1614): n is a, c, g, or t
  misc_feature (1617)..(1617): n is a, c, g, or t
  misc_feature (1620)..(1620): n is a, c, g, or t
  misc_feature (1623)..(1623): n is a, c, g, or t
  misc_feature (1626)..(1626): n is a, c, g, or t
  misc_feature (1629)..(1629): n is a, c, g, or t
  misc_feature (1632)..(1632): n is a, c, g, or t
  misc_feature (1635)..(1635): n is a, c, g, or t
  misc_feature (1641)..(1641): n is a, c, g, or t
  misc_feature (1644)..(1644): n is a, c, g, or t
  misc_feature (1650)..(1650): n is a, c, g, or t
  misc_feature (1656)..(1656): n is a, c, g, or t
  misc_feature (1659)..(1659): n is a, c, g, or t
  misc_feature (1668)..(1668): n is a, c, g, or t
  misc_feature (1671)..(1671): n is a, c, g, or t
  misc_feature (1674)..(1674): n is a, c, g, or t
  misc_feature (1677)..(1677): n is a, c, g, or t
  misc_feature (1680)..(1680): n is a, c, g, or t
  misc_feature (1683)..(1683): n is a, c, g, or t
  misc_feature (1686)..(1686): n is a, c, g, or t
  misc_feature (1695)..(1695): n is a, c, g, or t
  misc_feature (1701)..(1701): n is a, c, g, or t
  misc_feature (1704)..(1704): n is a, c, g, or t
  misc_feature (1707)..(1707): n is a, c, g, or t
  misc_feature (1710)..(1710): n is a, c, g, or t
  misc_feature (1713)..(1713): n is a, c, g, or t
  misc_feature (1716)..(1716): n is a, c, g, or t
  misc_feature (1719)..(1719): n is a, c, g, or t
  misc_feature (1722)..(1722): n is a, c, g, or t
  misc_feature (1728)..(1728): n is a, c, g, or t
  misc_feature (1731)..(1731): n is a, c, g, or t
  misc_feature (1734)..(1734): n is a, c, g, or t
  misc_feature (1737)..(1737): n is a, c, g, or t
  misc_feature (1740)..(1740): n is a, c, g, or t
  misc_feature (1743)..(1743): n is a, c, g, or t
  misc_feature (1746)..(1746): n is a, c, g, or t
  misc_feature (1749)..(1749): n is a, c, g, or t
  misc_feature (1752)..(1752): n is a, c, g, or t
  misc_feature (1755)..(1755): n is a, c, g, or t
  misc_feature (1758)..(1758): n is a, c, g, or t
  misc_feature (1761)..(1761): n is a, c, g, or t
  misc_feature (1764)..(1764): n is a, c, g, or t
  misc_feature (1773)..(1773): n is a, c, g, or t
  misc_feature (1782)..(1782): n is a, c, g, or t
  misc_feature (1785)..(1785): n is a, c, g, or t
  misc_feature (1788)..(1788): n is a, c, g, or t
  misc_feature (1791)..(1791): n is a, c, g, or t
  misc_feature (1800)..(1800): n is a, c, g, or t
  misc_feature (1803)..(1803): n is a, c, g, or t
  misc_feature (1806)..(1806): n is a, c, g, or t
  misc_feature (1809)..(1809): n is a, c, g, or t
  misc_feature (1812)..(1812): n is a, c, g, or t
  misc_feature (1818)..(1818): n is a, c, g, or t
  misc_feature (1824)..(1824): n is a, c, g, or t
  misc_feature (1827)..(1827): n is a, c, g, or t
  misc_feature (1830)..(1830): n is a, c, g, or t
  misc_feature (1842)..(1842): n is a, c, g, or t
  misc_feature (1845)..(1845): n is a, c, g, or t
  misc_feature (1848)..(1848): n is a, c, g, or t
  misc_feature (1854)..(1854): n is a, c, g, or t
  misc_feature (1857)..(1857): n is a, c, g, or t
  misc_feature (1860)..(1860): n is a, c, g, or t
  misc_feature (1863)..(1863): n is a, c, g, or t
  misc_feature (1869)..(1869): n is a, c, g, or t
  misc_feature (1872)..(1872): n is a, c, g, or t
  misc_feature (1875)..(1875): n is a, c, g, or t
  misc_feature (1878)..(1878): n is a, c, g, or t
  misc_feature (1881)..(1881): n is a, c, g, or t
  misc_feature (1887)..(1887): n is a, c, g, or t
  misc_feature (1890)..(1890): n is a, c, g, or t
  misc_feature (1893)..(1893): n is a, c, g, or t
  misc_feature (1899)..(1899): n is a, c, g, or t
  misc_feature (1902)..(1902): n is a, c, g, or t
  misc_feature (1905)..(1905): n is a, c, g, or t
  misc_feature (1908)..(1908): n is a, c, g, or t
  misc_feature (1911)..(1911): n is a, c, g, or t
  misc_feature (1914)..(1914): n is a, c, g, or t
  misc_feature (1917)..(1917): n is a, c, g, or t
  misc_feature (1920)..(1920): n is a, c, g, or t
  misc_feature (1923)..(1923): n is a, c, g, or t
  misc_feature (1926)..(1926): n is a, c, g, or t
  misc_feature (1932)..(1932): n is a, c, g, or t
  misc_feature (1935)..(1935): n is a, c, g, or t
  misc_feature (1938)..(1938): n is a, c, g, or t
  misc_feature (1941)..(1941): n is a, c, g, or t
  misc_feature (1944)..(1944): n is a, c, g, or t
  misc_feature (1947)..(1947): n is a, c, g, or t
  misc_feature (1953)..(1953): n is a, c, g, or t
  misc_feature (1959)..(1959): n is a, c, g, or t
  misc_feature (1962)..(1962): n is a, c, g, or t
  misc_feature (1965)..(1965): n is a, c, g, or t
  misc_feature (1968)..(1968): n is a, c, g, or t
  misc_feature (1971)..(1971): n is a, c, g, or t
  misc_feature (1974)..(1974): n is a, c, g, or t
  misc_feature (1977)..(1977): n is a, c, g, or t
  misc_feature (1983)..(1983): n is a, c, g, or t
  misc_feature (1986)..(1986): n is a, c, g, or t
  misc_feature (1992)..(1992): n is a, c, g, or t
  misc_feature (1995)..(1995): n is a, c, g, or t
  misc_feature (1998)..(1998): n is a, c, g, or t
  misc_feature (2004)..(2004): n is a, c, g, or t
  misc_feature (2007)..(2007): n is a, c, g, or t
  misc_feature (2010)..(2010): n is a, c, g, or t
  misc_feature (2013)..(2013): n is a, c, g, or t
  misc_feature (2016)..(2016): n is a, c, g, or t
  misc_feature (2025)..(2025): n is a, c, g, or t
  misc_feature (2028)..(2028): n is a, c, g, or t
  misc_feature (2031)..(2031): n is a, c, g, or t
  misc_feature (2034)..(2034): n is a, c, g, or t
  misc_feature (2040)..(2040): n is a, c, g, or t
  misc_feature (2043)..(2043): n is a, c, g, or t
  misc_feature (2046)..(2046): n is a, c, g, or t
  misc_feature (2049)..(2049): n is a, c, g, or t
  misc_feature (2052)..(2052): n is a, c, g, or t
  misc_feature (2061)..(2061): n is a, c, g, or t
  misc_feature (2064)..(2064): n is a, c, g, or t
  misc_feature (2067)..(2067): n is a, c, g, or t
  misc_feature (2070)..(2070): n is a, c, g, or t
  misc_feature (2079)..(2079): n is a, c, g, or t
  misc_feature (2082)..(2082): n is a, c, g, or t
  misc_feature (2085)..(2085): n is a, c, g, or t
  misc_feature (2088)..(2088): n is a, c, g, or t
  misc_feature (2091)..(2091): n is a, c, g, or t
  misc_feature (2094)..(2094): n is a, c, g, or t
  misc_feature (2097)..(2097): n is a, c, g, or t
  misc_feature (2100)..(2100): n is a, c, g, or t
  misc_feature (2106)..(2106): n is a, c, g, or t
  misc_feature (2109)..(2109): n is a, c, g, or t
  misc_feature (2112)..(2112): n is a, c, g, or t
  misc_feature (2115)..(2115): n is a, c, g, or t
  misc_feature (2127)..(2127): n is a, c, g, or t
  misc_feature (2130)..(2130): n is a, c, g, or t
  misc_feature (2139)..(2139): n is a, c, g, or t
  misc_feature (2142)..(2142): n is a, c, g, or t
  misc_feature (2145)..(2145): n is a, c, g, or t
  misc_feature (2148)..(2148): n is a, c, g, or t
  misc_feature (2157)..(2157): n is a, c, g, or t
  misc_feature (2160)..(2160): n is a, c, g, or t
  misc_feature (2166)..(2166): n is a, c, g, or t
  misc_feature (2169)..(2169): n is a, c, g, or t
  misc_feature (2172)..(2172): n is a, c, g, or t
  misc_feature (2175)..(2175): n is a, c, g, or t
  misc_feature (2184)..(2184): n is a, c, g, or t
  misc_feature (2190)..(2190): n is a, c, g, or t
  misc_feature (2193)..(2193): n is a, c, g, or t
  misc_feature (2199)..(2199): n is a, c, g, or t
  misc_feature (2202)..(2202): n is a, c, g, or t
  misc_feature (2205)..(2205): n is a, c, g, or t
  misc_feature (2208)..(2208): n is a, c, g, or t
  misc_feature (2211)..(2211): n is a, c, g, or t
  misc_feature (2214)..(2214): n is a, c, g, or t
  misc_feature (2220)..(2220): n is a, c, g, or t
  misc_feature (2223)..(2223): n is a, c, g, or t
  misc_feature (2229)..(2229): n is a, c, g, or t
  misc_feature (2235)..(2235): n is a, c, g, or t
  misc_feature (2238)..(2238): n is a, c, g, or t
  misc_feature (2241)..(2241): n is a, c, g, or t
  misc_feature (2244)..(2244): n is a, c, g, or t
  misc_feature (2247)..(2247): n is a, c, g, or t
  misc_feature (2250)..(2250): n is a, c, g, or t
  misc_feature (2256)..(2256): n is a, c, g, or t
  misc_feature (2262)..(2262): n is a, c, g, or t
  misc_feature (2265)..(2265): n is a, c, g, or t
  misc_feature (2268)..(2268): n is a, c, g, or t
  misc_feature (2271)..(2271): n is a, c, g, or t
  misc_feature (2274)..(2274): n is a, c, g, or t
  misc_feature (2277)..(2277): n is a, c, g, or t
  misc_feature (2280)..(2280): n is a, c, g, or t
  misc_feature (2283)..(2283): n is a, c, g, or t
  misc_feature (2289)..(2289): n is a, c, g, or t
  misc_feature (2292)..(2292): n is a, c, g, or t
  misc_feature (2298)..(2298): n is a, c, g, or t
  misc_feature (2301)..(2301): n is a, c, g, or t
  misc_feature (2304)..(2304): n is a, c, g, or t
  misc_feature (2307)..(2307): n is a, c, g, or t
  misc_feature (2310)..(2310): n is a, c, g, or t
  misc_feature (2313)..(2313): n is a, c, g, or t
  misc_feature (2316)..(2316): n is a, c, g, or t
  misc_feature (2319)..(2319): n is a, c, g, or t
  misc_feature (2322)..(2322): n is a, c, g, or t
  misc_feature (2328)..(2328): n is a, c, g, or t
  misc_feature (2337)..(2337): n is a, c, g, or t
  misc_feature (2343)..(2343): n is a, c, g, or t
  misc_feature (2346)..(2346): n is a, c, g, or t
  misc_feature (2349)..(2349): n is a, c, g, or t
  misc_feature (2352)..(2352): n is a, c, g, or t
  misc_feature (2355)..(2355): n is a, c, g, or t
  misc_feature (2358)..(2358): n is a, c, g, or t
  misc_feature (2361)..(2361): n is a, c, g, or t
  misc_feature (2364)..(2364): n is a, c, g, or t
  misc_feature (2370)..(2370): n is a, c, g, or t
  misc_feature (2373)..(2373): n is a, c, g, or t
  misc_feature (2379)..(2379): n is a, c, g, or t
  misc_feature (2382)..(2382): n is a, c, g, or t
  misc_feature (2388)..(2388): n is a, c, g, or t
  misc_feature (2391)..(2391): n is a, c, g, or t
  misc_feature (2400)..(2400): n is a, c, g, or t
  misc_feature (2403)..(2403): n is a, c, g, or t
  misc_feature (2406)..(2406): n is a, c, g, or t
  misc_feature (2409)..(2409): n is a, c, g, or t
  misc_feature (2418)..(2418): n is a, c, g, or t
  misc_feature (2421)..(2421): n is a, c, g, or t
  misc_feature (2424)..(2424): n is a, c, g, or t
  misc_feature (2427)..(2427): n is a, c, g, or t
  misc_feature (2430)..(2430): n is a, c, g, or t
  misc_feature (2436)..(2436): n is a, c, g, or t
  misc_feature (2445)..(2445): n is a, c, g, or t
  misc_feature (2448)..(2448): n is a, c, g, or t
  misc_feature (2451)..(2451): n is a, c, g, or t
  misc_feature (2454)..(2454): n is a, c, g, or t
  misc_feature (2457)..(2457): n is a, c, g, or t
  misc_feature (2463)..(2463): n is a, c, g, or t
  misc_feature (2466)..(2466): n is a, c, g, or t
  misc_feature (2469)..(2469): n is a, c, g, or t
  misc_feature (2472)..(2472): n is a, c, g, or t
  misc_feature (2478)..(2478): n is a, c, g, or t
  misc_feature (2481)..(2481): n is a, c, g, or t
  misc_feature (2484)..(2484): n is a, c, g, or t
  misc_feature (2487)..(2487): n is a, c, g, or t
  misc_feature (2490)..(2490): n is a, c, g, or t
  misc_feature (2493)..(2493): n is a, c, g, or t
  misc_feature (2499)..(2499): n is a, c, g, or t
  misc_feature (2502)..(2502): n is a, c, g, or t
  misc_feature (2505)..(2505): n is a, c, g, or t
  misc_feature (2508)..(2508): n is a, c, g, or t
  misc_feature (2511)..(2511): n is a, c, g, or t
  misc_feature (2514)..(2514): n is a, c, g, or t
  misc_feature (2517)..(2517): n is a, c, g, or t
  misc_feature (2520)..(2520): n is a, c, g, or t
  misc_feature (2523)..(2523): n is a, c, g, or t
  misc_feature (2526)..(2526): n is a, c, g, or t
  misc_feature (2529)..(2529): n is a, c, g, or t
  misc_feature (2532)..(2532): n is a, c, g, or t
  misc_feature (2535)..(2535): n is a, c, g, or t
  misc_feature (2538)..(2538): n is a, c, g, or t
  misc_feature (2541)..(2541): n is a, c, g, or t
  misc_feature (2544)..(2544): n is a, c, g, or t
  misc_feature (2547)..(2547): n is a, c, g, or t
  misc_feature (2553)..(2553): n is a, c, g, or t
  misc_feature (2562)..(2562): n is a, c, g, or t
  misc_feature (2565)..(2565): n is a, c, g, or t
  misc_feature (2568)..(2568): n is a, c, g, or t
  misc_feature (2571)..(2571): n is a, c, g, or t
  misc_feature (2577)..(2577): n is a, c, g, or t
  misc_feature (2580)..(2580): n is a, c, g, or t
  misc_feature (2586)..(2586): n is a, c, g, or t
  misc_feature (2589)..(2589): n is a, c, g, or t
  misc_feature (2595)..(2595): n is a, c, g, or t
  misc_feature (2598)..(2598): n is a, c, g, or t
  misc_feature (2601)..(2601): n is a, c, g, or t
  misc_feature (2604)..(2604): n is a, c, g, or t
  misc_feature (2607)..(2607): n is a, c, g, or t
  misc_feature (2613)..(2613): n is a, c, g, or t
  misc_feature (2616)..(2616): n is a, c, g, or t
  misc_feature (2619)..(2619): n is a, c, g, or t
  misc_feature (2622)..(2622): n is a, c, g, or t
  misc_feature (2625)..(2625): n is a, c, g, or t
  misc_feature (2628)..(2628): n is a, c, g, or t
  misc_feature (2634)..(2634): n is a, c, g, or t
  misc_feature (2640)..(2640): n is a, c, g, or t
  misc_feature (2643)..(2643): n is a, c, g, or t
  misc_feature (2646)..(2646): n is a, c, g, or t
  misc_feature (2649)..(2649): n is a, c, g, or t
  misc_feature (2652)..(2652): n is a, c, g, or t
  misc_feature (2661)..(2661): n is a, c, g, or t
  misc_feature (2664)..(2664): n is a, c, g, or t
  misc_feature (2667)..(2667): n is a, c, g, or t
  misc_feature (2670)..(2670): n is a, c, g, or t
  misc_feature (2673)..(2673): n is a, c, g, or t
  misc_feature (2676)..(2676): n is a, c, g, or t
  misc_feature (2679)..(2679): n is a, c, g, or t
  misc_feature (2682)..(2682): n is a, c, g, or t
  misc_feature (2685)..(2685): n is a, c, g, or t
  misc_feature (2688)..(2688): n is a, c, g, or t
  misc_feature (2697)..(2697): n is a, c, g, or t
  misc_feature (2703)..(2703): n is a, c, g, or t
  misc_feature (2706)..(2706): n is a, c, g, or t
  misc_feature (2712)..(2712): n is a, c, g, or t
  misc_feature (2715)..(2715): n is a, c, g, or t
  misc_feature (2718)..(2718): n is a, c, g, or t
  misc_feature (2721)..(2721): n is a, c, g, or t
  misc_feature (2724)..(2724): n is a, c, g, or t
  misc_feature (2730)..(2730): n is a, c, g, or t
  misc_feature (2733)..(2733): n is a, c, g, or t
  misc_feature (2736)..(2736): n is a, c, g, or t
  misc_feature (2739)..(2739): n is a, c, g, or t
  misc_feature (2742)..(2742): n is a, c, g, or t
  misc_feature (2745)..(2745): n is a, c, g, or t
  misc_feature (2751)..(2751): n is a, c, g, or t
  misc_feature (2757)..(2757): n is a, c, g, or t
  misc_feature (2763)..(2763): n is a, c, g, or t
  misc_feature (2769)..(2769): n is a, c, g, or t
  misc_feature (2778)..(2778): n is a, c, g, or t
  misc_feature (2781)..(2781): n is a, c, g, or t
  misc_feature (2787)..(2787): n is a, c, g, or t
  misc_feature (2790)..(2790): n is a, c, g, or t
  misc_feature (2793)..(2793): n is a, c, g, or t
  misc_feature (2796)..(2796): n is a, c, g, or t
  misc_feature (2799)..(2799): n is a, c, g, or t
  misc_feature (2805)..(2805): n is a, c, g, or t
  misc_feature (2811)..(2811): n is a, c, g, or t
  misc_feature (2814)..(2814): n is a, c, g, or t
  misc_feature (2817)..(2817): n is a, c, g, or t
  misc_feature (2820)..(2820): n is a, c, g, or t
  misc_feature (2823)..(2823): n is a, c, g, or t
  misc_feature (2832)..(2832): n is a, c, g, or t
  misc_feature (2838)..(2838): n is a, c, g, or t
  misc_feature (2841)..(2841): n is a, c, g, or t
  misc_feature (2844)..(2844): n is a, c, g, or t
  misc_feature (2847)..(2847): n is a, c, g, or t
  misc_feature (2850)..(2850): n is a, c, g, or t
  misc_feature (2853)..(2853): n is a, c, g, or t
  misc_feature (2856)..(2856): n is a, c, g, or t
  misc_feature (2859)..(2859): n is a, c, g, or t
  misc_feature (2862)..(2862): n is a, c, g, or t
  misc_feature (2865)..(2865): n is a, c, g, or t
  misc_feature (2868)..(2868): n is a, c, g, or t
  misc_feature (2871)..(2871): n is a, c, g, or t
  misc_feature (2874)..(2874): n is a, c, g, or t
  misc_feature (2877)..(2877): n is a, c, g, or t
  misc_feature (2880)..(2880): n is a, c, g, or t
  misc_feature (2883)..(2883): n is a, c, g, or t
  misc_feature (2886)..(2886): n is a, c, g, or t
  misc_feature (2898)..(2898): n is a, c, g, or t
  misc_feature (2901)..(2901): n is a, c, g, or t
  misc_feature (2904)..(2904): n is a, c, g, or t
  misc_feature (2907)..(2907): n is a, c, g, or t
  misc_feature (2913)..(2913): n is a, c, g, or t
  misc_feature (2916)..(2916): n is a, c, g, or t
  misc_feature (2919)..(2919): n is a, c, g, or t
  misc_feature (2922)..(2922): n is a, c, g, or t
  misc_feature (2925)..(2925): n is a, c, g, or t
  misc_feature (2934)..(2934): n is a, c, g, or t
  misc_feature (2940)..(2940): n is a, c, g, or t
  misc_feature (2943)..(2943): n is a, c, g, or t
  misc_feature (2946)..(2946): n is a, c, g, or t
  misc_feature (2949)..(2949): n is a, c, g, or t
  misc_feature (2952)..(2952): n is a, c, g, or t
  misc_feature (2955)..(2955): n is a, c, g, or t
  misc_feature (2961)..(2961): n is a, c, g, or t
  misc_feature (2964)..(2964): n is a, c, g, or t
  misc_feature (2967)..(2967): n is a, c, g, or t
  misc_feature (2970)..(2970): n is a, c, g, or t
  misc_feature (2976)..(2976): n is a, c, g, or t
  misc_feature (2979)..(2979): n is a, c, g, or t
  misc_feature (2985)..(2985): n is a, c, g, or t
  misc_feature (2988)..(2988): n is a, c, g, or t
  misc_feature (2994)..(2994): n is a, c, g, or t
  misc_feature (2997)..(2997): n is a, c, g, or t
  misc_feature (3003)..(3003): n is a, c, g, or t
  misc_feature (3006)..(3006): n is a, c, g, or t
  misc_feature (3009)..(3009): n is a, c, g, or t
  misc_feature (3015)..(3015): n is a, c, g, or t
  misc_feature (3021)..(3021): n is a, c, g, or t
  misc_feature (3024)..(3024): n is a, c, g, or t
  misc_feature (3027)..(3027): n is a, c, g, or t
  misc_feature (3030)..(3030): n is a, c, g, or t
  misc_feature (3033)..(3033): n is a, c, g, or t
  misc_feature (3036)..(3036): n is a, c, g, or t
  misc_feature (3039)..(3039): n is a, c, g, or t
  misc_feature (3042)..(3042): n is a, c, g, or t
  misc_feature (3045)..(3045): n is a, c, g, or t
  misc_feature (3048)..(3048): n is a, c, g, or t
  misc_feature (3051)..(3051): n is a, c, g, or t
  misc_feature (3054)..(3054): n is a, c, g, or t
  misc_feature (3057)..(3057): n is a, c, g, or t
  misc_feature (3060)..(3060): n is a, c, g, or t
  misc_feature (3063)..(3063): n is a, c, g, or t
  misc_feature (3069)..(3069): n is a, c, g, or t
  misc_feature (3078)..(3078): n is a, c, g, or t
  misc_feature (3084)..(3084): n is a, c, g, or t
  misc_feature (3087)..(3087): n is a, c, g, or t
  misc_feature (3096)..(3096): n is a, c, g, or t
  misc_feature (3099)..(3099): n is a, c, g, or t
  misc_feature (3102)..(3102): n is a, c, g, or t
  misc_feature (3105)..(3105): n is a, c, g, or t
  misc_feature (3108)..(3108): n is a, c, g, or t
  misc_feature (3111)..(3111): n is a, c, g, or t
  misc_feature (3117)..(3117): n is a, c, g, or t
  misc_feature (3123)..(3123): n is a, c, g, or t
  misc_feature (3126)..(3126): n is a, c, g, or t
  misc_feature (3132)..(3132): n is a, c, g, or t
  misc_feature (3135)..(3135): n is a, c, g, or t
  misc_feature (3144)..(3144): n is a, c, g, or t
  misc_feature (3147)..(3147): n is a, c, g, or t
  misc_feature (3153)..(3153): n is a, c, g, or t
  misc_feature (3156)..(3156): n is a, c, g, or t
  misc_feature (3162)..(3162): n is a, c, g, or t
  misc_feature (3165)..(3165): n is a, c, g, or t
  misc_feature (3171)..(3171): n is a, c, g, or t
  misc_feature (3180)..(3180): n is a, c, g, or t
  misc_feature (3186)..(3186): n is a, c, g, or t
  misc_feature (3189)..(3189): n is a, c, g, or t
  misc_feature (3198)..(3198): n is a, c, g, or t
  misc_feature (3207)..(3207): n is a, c, g, or t
  misc_feature (3213)..(3213): n is a, c, g, or t
  misc_feature (3216)..(3216): n is a, c, g, or t
  misc_feature (3219)..(3219): n is a, c, g, or t
  misc_feature (3222)..(3222): n is a, c, g, or t
  misc_feature (3225)..(3225): n is a, c, g, or t
  misc_feature (3231)..(3231): n is a, c, g, or t
  misc_feature (3234)..(3234): n is a, c, g, or t
  misc_feature (3237)..(3237): n is a, c, g, or t
  misc_feature (3240)..(3240): n is a, c, g, or t
  misc_feature (3243)..(3243): n is a, c, g, or t
  misc_feature (3246)..(3246): n is a, c, g, or t
  misc_feature (3249)..(3249): n is a, c, g, or t
  misc_feature (3252)..(3252): n is a, c, g, or t
  misc_feature (3258)..(3258): n is a, c, g, or t
  misc_feature (3261)..(3261): n is a, c, g, or t
  misc_feature (3264)..(3264): n is a, c, g, or t
  misc_feature (3267)..(3267): n is a, c, g, or t
  misc_feature (3270)..(3270): n is a, c, g, or t
  misc_feature (3276)..(3276): n is a, c, g, or t
  misc_feature (3279)..(3279): n is a, c, g, or t
  misc_feature (3285)..(3285): n is a, c, g, or t
  misc_feature (3288)..(3288): n is a, c, g, or t
  misc_feature (3291)..(3291): n is a, c, g, or t
  misc_feature (3294)..(3294): n is a, c, g, or t
  misc_feature (3297)..(3297): n is a, c, g, or t
  misc_feature (3300)..(3300): n is a, c, g, or t
  misc_feature (3303)..(3303): n is a, c, g, or t
  misc_feature (3306)..(3306): n is a, c, g, or t
  misc_feature (3315)..(3315): n is a, c, g, or t
  misc_feature (3318)..(3318): n is a, c, g, or t
  misc_feature (3324)..(3324): n is a, c, g, or t
  misc_feature (3327)..(3327): n is a, c, g, or t
  misc_feature (3330)..(3330): n is a, c, g, or t
  misc_feature (3333)..(3333): n is a, c, g, or t
  misc_feature (3336)..(3336): n is a, c, g, or t
  misc_feature (3339)..(3339): n is a, c, g, or t
  misc_feature (3342)..(3342): n is a, c, g, or t
  misc_feature (3345)..(3345): n is a, c, g, or t
  misc_feature (3351)..(3351): n is a, c, g, or t
  misc_feature (3354)..(3354): n is a, c, g, or t
  misc_feature (3360)..(3360): n is a, c, g, or t
  misc_feature (3366)..(3366): n is a, c, g, or t
  misc_feature (3369)..(3369): n is a, c, g, or t
  misc_feature (3375)..(3375): n is a, c, g, or t
  misc_feature (3378)..(3378): n is a, c, g, or t
  misc_feature (3381)..(3381): n is a, c, g, or t
  misc_feature (3387)..(3387): n is a, c, g, or t
  misc_feature (3390)..(3390): n is a, c, g, or t
  misc_feature (3396)..(3396): n is a, c, g, or t
  misc_feature (3399)..(3399): n is a, c, g, or t
  misc_feature (3402)..(3402): n is a, c, g, or t
  misc_feature (3405)..(3405): n is a, c, g, or t
  misc_feature (3408)..(3408): n is a, c, g, or t
  misc_feature (3414)..(3414): n is a, c, g, or t
  misc_feature (3417)..(3417): n is a, c, g, or t
  misc_feature (3423)..(3423): n is a, c, g, or t
  misc_feature (3426)..(3426): n is a, c, g, or t
  misc_feature (3429)..(3429): n is a, c, g, or t
  misc_feature (3432)..(3432): n is a, c, g, or t
  misc_feature (3435)..(3435): n is a, c, g, or t
  misc_feature (3438)..(3438): n is a, c, g, or t
  misc_feature (3444)..(3444): n is a, c, g, or t
  misc_feature (3447)..(3447): n is a, c, g, or t
  misc_feature (3450)..(3450): n is a, c, g, or t
  misc_feature (3453)..(3453): n is a, c, g, or t
  misc_feature (3456)..(3456): n is a, c, g, or t
  misc_feature (3459)..(3459): n is a, c, g, or t
  misc_feature (3462)..(3462): n is a, c, g, or t
  misc_feature (3465)..(3465): n is a, c, g, or t
  misc_feature (3468)..(3468): n is a, c, g, or t
  misc_feature (3471)..(3471): n is a, c, g, or t
  misc_feature (3474)..(3474): n is a, c, g, or t
  misc_feature (3477)..(3477): n is a, c, g, or t
  misc_feature (3483)..(3483): n is a, c, g, or t
  misc_feature (3492)..(3492): n is a, c, g, or t
  misc_feature (3498)..(3498): n is a, c, g, or t
  misc_feature (3501)..(3501): n is a, c, g, or t
  misc_feature (3507)..(3507): n is a, c, g, or t
  misc_feature (3513)..(3513): n is a, c, g, or t
  misc_feature (3516)..(3516): n is a, c, g, or t
  misc_feature (3519)..(3519): n is a, c, g, or t
  misc_feature (3522)..(3522): n is a, c, g, or t
  misc_feature (3528)..(3528): n is a, c, g, or t
  misc_feature (3531)..(3531): n is a, c, g, or t
  misc_feature (3534)..(3534): n is a, c, g, or t
  misc_feature (3537)..(3537): n is a, c, g, or t
  misc_feature (3540)..(3540): n is a, c, g, or t
  misc_feature (3549)..(3549): n is a, c, g, or t
  misc_feature (3555)..(3555): n is a, c, g, or t
  misc_feature (3558)..(3558): n is a, c, g, or t
  misc_feature (3564)..(3564): n is a, c, g, or t
  misc_feature (3567)..(3567): n is a, c, g, or t
  misc_feature (3570)..(3570): n is a, c, g, or t
  misc_feature (3576)..(3576): n is a, c, g, or t
  misc_feature (3579)..(3579): n is a, c, g, or t
  misc_feature (3582)..(3582): n is a, c, g, or t
  misc_feature (3585)..(3585): n is a, c, g, or t
  misc_feature (3588)..(3588): n is a, c, g, or t
  misc_feature (3591)..(3591): n is a, c, g, or t
  misc_feature (3594)..(3594): n is a, c, g, or t
  misc_feature (3597)..(3597): n is a, c, g, or t
  misc_feature (3600)..(3600): n is a, c, g, or t
  misc_feature (3603)..(3603): n is a, c, g, or t
  misc_feature (3609)..(3609): n is a, c, g, or t
  misc_feature (3612)..(3612): n is a, c, g, or t
  misc_feature (3615)..(3615): n is a, c, g, or t
  misc_feature (3618)..(3618): n is a, c, g, or t
  misc_feature (3621)..(3621): n is a, c, g, or t
  misc_feature (3627)..(3627): n is a, c, g, or t
  misc_feature (3630)..(3630): n is a, c, g, or t
  misc_feature (3636)..(3636): n is a, c, g, or t
  misc_feature (3639)..(3639): n is a, c, g, or t
  misc_feature (3645)..(3645): n is a, c, g, or t
  misc_feature (3648)..(3648): n is a, c, g, or t
  misc_feature (3651)..(3651): n is a, c, g, or t
  misc_feature (3654)..(3654): n is a, c, g, or t
  misc_feature (3657)..(3657): n is a, c, g, or t
  misc_feature (3660)..(3660): n is a, c, g, or t
  misc_feature (3666)..(3666): n is a, c, g, or t
  misc_feature (3672)..(3672): n is a, c, g, or t
  misc_feature (3675)..(3675): n is a, c, g, or t
  misc_feature (3678)..(3678): n is a, c, g, or t
  misc_feature (3681)..(3681): n is a, c, g, or t
  misc_feature (3684)..(3684): n is a, c, g, or t
  misc_feature (3687)..(3687): n is a, c, g, or t
  misc_feature (3690)..(3690): n is a, c, g, or t
  misc_feature (3693)..(3693): n is a, c, g, or t
  misc_feature (3696)..(3696): n is a, c, g, or t
  misc_feature (3699)..(3699): n is a, c, g, or t
  misc_feature (3702)..(3702): n is a, c, g, or t
  misc_feature (3705)..(3705): n is a, c, g, or t
  misc_feature (3708)..(3708): n is a, c, g, or t
  misc_feature (3711)..(3711): n is a, c, g, or t
  misc_feature (3714)..(3714): n is a, c, g, or t
  misc_feature (3717)..(3717): n is a, c, g, or t
  misc_feature (3720)..(3720): n is a, c, g, or t
  misc_feature (3729)..(3729): n is a, c, g, or t
  misc_feature (3735)..(3735): n is a, c, g, or t
  misc_feature (3738)..(3738): n is a, c, g, or t
  misc_feature (3744)..(3744): n is a, c, g, or t
  misc_feature (3747)..(3747): n is a, c, g, or t
  misc_feature (3753)..(3753): n is a, c, g, or t
  misc_feature (3756)..(3756): n is a, c, g, or t
  misc_feature (3762)..(3762): n is a, c, g, or t
  misc_feature (3765)..(3765): n is a, c, g, or t
  misc_feature (3768)..(3768): n is a, c, g, or t
  misc_feature (3774)..(3774): n is a, c, g, or t
  misc_feature (3777)..(3777): n is a, c, g, or t
  misc_feature (3783)..(3783): n is a, c, g, or t
  misc_feature (3792)..(3792): n is a, c, g, or t
  misc_feature (3798)..(3798): n is a, c, g, or t
  misc_feature (3801)..(3801): n is a, c, g, or t
  misc_feature (3807)..(3807): n is a, c, g, or t
  misc_feature (3810)..(3810): n is a, c, g, or t
  misc_feature (3813)..(3813): n is a, c, g, or t
  misc_feature (3816)..(3816): n is a, c, g, or t
  misc_feature (3819)..(3819): n is a, c, g, or t
  misc_feature (3825)..(3825): n is a, c, g, or t
  misc_feature (3828)..(3828): n is a, c, g, or t
  misc_feature (3831)..(3831): n is a, c, g, or t
  misc_feature (3837)..(3837): n is a, c, g, or t
  misc_feature (3843)..(3843): n is a, c, g, or t
  misc_feature (3846)..(3846): n is a, c, g, or t
  misc_feature (3852)..(3852): n is a, c, g, or t
  misc_feature (3855)..(3855): n is a, c, g, or t
  misc_feature (3864)..(3864): n is a, c, g, or t
  misc_feature (3867)..(3867): n is a, c, g, or t
  misc_feature (3870)..(3870): n is a, c, g, or t
  misc_feature (3873)..(3873): n is a, c, g, or t
  misc_feature (3879)..(3879): n is a, c, g, or t
  misc_feature (3882)..(3882): n is a, c, g, or t
  misc_feature (3885)..(3885): n is a, c, g, or t
  misc_feature (3888)..(3888): n is a, c, g, or t
  misc_feature (3891)..(3891): n is a, c, g, or t
  misc_feature (3897)..(3897): n is a, c, g, or t
  misc_feature (3900)..(3900): n is a, c, g, or t
  misc_feature (3906)..(3906): n is a, c, g, or t
  misc_feature (3909)..(3909): n is a, c, g, or t
  misc_feature (3918)..(3918): n is a, c, g, or t
  misc_feature (3924)..(3924): n is a, c, g, or t
  misc_feature (3927)..(3927): n is a, c, g, or t
  misc_feature (3930)..(3930): n is a, c, g, or t
  misc_feature (3933)..(3933): n is a, c, g, or t
  misc_feature (3936)..(3936): n is a, c, g, or t
  misc_feature (3939)..(3939): n is a, c, g, or t
  misc_feature (3942)..(3942): n is a, c, g, or t
  misc_feature (3945)..(3945): n is a, c, g, or t
  misc_feature (3948)..(3948): n is a, c, g, or t
  misc_feature (3954)..(3954): n is a, c, g, or t
  misc_feature (3960)..(3960): n is a, c, g, or t
  misc_feature (3963)..(3963): n is a, c, g, or t
  misc_feature (3969)..(3969): n is a, c, g, or t
  misc_feature (3972)..(3972): n is a, c, g, or t
  misc_feature (3975)..(3975): n is a, c, g, or t
  misc_feature (3978)..(3978): n is a, c, g, or t
  misc_feature (3984)..(3984): n is a, c, g, or t
  misc_feature (3987)..(3987): n is a, c, g, or t
  misc_feature (3993)..(3993): n is a, c, g, or t
  misc_feature (3996)..(3996): n is a, c, g, or t
  misc_feature (3999)..(3999): n is a, c, g, or t
  misc_feature (4002)..(4002): n is a, c, g, or t
  misc_feature (4005)..(4005): n is a, c, g, or t
  misc_feature (4008)..(4008): n is a, c, g, or t
  misc_feature (4011)..(4011): n is a, c, g, or t
  misc_feature (4014)..(4014): n is a, c, g, or t
  misc_feature (4017)..(4017): n is a, c, g, or t
  misc_feature (4020)..(4020): n is a, c, g, or t
  misc_feature (4029)..(4029): n is a, c, g, or t
  misc_feature (4035)..(4035): n is a, c, g, or t
  misc_feature (4038)..(4038): n is a, c, g, or t
  misc_feature (4041)..(4041): n is a, c, g, or t
  misc_feature (4044)..(4044): n is a, c, g, or t
  misc_feature (4047)..(4047): n is a, c, g, or t
  misc_feature (4053)..(4053): n is a, c, g, or t
  misc_feature (4056)..(4056): n is a, c, g, or t
  misc_feature (4059)..(4059): n is a, c, g, or t
  misc_feature (4065)..(4065): n is a, c, g, or t
  misc_feature (4068)..(4068): n is a, c, g, or t
  misc_feature (4071)..(4071): n is a, c, g, or t
  misc_feature (4074)..(4074): n is a, c, g, or t
  misc_feature (4077)..(4077): n is a, c, g, or t
  misc_feature (4083)..(4083): n is a, c, g, or t
  misc_feature (4086)..(4086): n is a, c, g, or t
  misc_feature (4092)..(4092): n is a, c, g, or t
  misc_feature (4095)..(4095): n is a, c, g, or t
  misc_feature (4098)..(4098): n is a, c, g, or t
  misc_feature (4101)..(4101): n is a, c, g, or t
  misc_feature (4107)..(4107): n is a, c, g, or t
  misc_feature (4110)..(4110): n is a, c, g, or t
  misc_feature (4119)..(4119): n is a, c, g, or t
  misc_feature (4122)..(4122): n is a, c, g, or t
  misc_feature (4125)..(4125): n is a, c, g, or t
  misc_feature (4128)..(4128): n is a, c, g, or t
  misc_feature (4131)..(4131): n is a, c, g, or t
  misc_feature (4134)..(4134): n is a, c, g, or t
  misc_feature (4137)..(4137): n is a, c, g, or t
  misc_feature (4140)..(4140): n is a, c, g, or t
  misc_feature (4143)..(4143): n is a, c, g, or t
  misc_feature (4146)..(4146): n is a, c, g, or t
  misc_feature (4149)..(4149): n is a, c, g, or t
  misc_feature (4152)..(4152): n is a, c, g, or t
  misc_feature (4155)..(4155): n is a, c, g, or t
  misc_feature (4161)..(4161): n is a, c, g, or t
  misc_feature (4164)..(4164): n is a, c, g, or t
  misc_feature (4167)..(4167): n is a, c, g, or t
  misc_feature (4170)..(4170): n is a, c, g, or t
  misc_feature (4173)..(4173): n is a, c, g, or t
  misc_feature (4176)..(4176): n is a, c, g, or t
  misc_feature (4182)..(4182): n is a, c, g, or t
  misc_feature (4185)..(4185): n is a, c, g, or t
  misc_feature (4188)..(4188): n is a, c, g, or t
  misc_feature (4191)..(4191): n is a, c, g, or t
  misc_feature (4200)..(4200): n is a, c, g, or t
  misc_feature (4203)..(4203): n is a, c, g, or t
  misc_feature (4206)..(4206): n is a, c, g, or t
  misc_feature (4209)..(4209): n is a, c, g, or t
  misc_feature (4218)..(4218): n is a, c, g, or t
  misc_feature (4221)..(4221): n is a, c, g, or t
  misc_feature (4227)..(4227): n is a, c, g, or t
  misc_feature (4233)..(4233): n is a, c, g, or t
  misc_feature (4236)..(4236): n is a, c, g, or t
  misc_feature (4242)..(4242): n is a, c, g, or t
  misc_feature (4245)..(4245): n is a, c, g, or t
  misc_feature (4251)..(4251): n is a, c, g, or t
ggngcnmgnggnmgnccnggnccnathggnathcarggnccnacnggnccncarggnttyacnggnwsnacnggnytnwsnggnytnaarggngarmgnggnttyccnggnytnytnggnccntayggnccnaarggngayaarggnccnatgggngtnccnggnttyytnggnathaayggnathccnggncayccnggncarccnggnccnmgnggnccnccnggnytngayggntgyaayggnacncarggngcngtnggnttyccnggnccngayggntayccnggnytnytnggnccnccnggnytnccnggncaraarggnwsnaarggngayccngtnytngcnccnggnwsnttyaarggnatgaarggngayccnggnytnccnggnytngayggnathacnggnccncarggngcnccnggnttyccnggngcngtnggnccngcnggnccnccnggnytncarggnccnccnggnccnccnggnccnytnggnccngayggnaayatgggnytnggnttycarggngaraarggngtnaarggngaygtnggnytnccnggnccngcnggnccnccnccnwsnacnggngarytngarttyatgggnttyccnaarggnaaraarggnwsnaarggngarccnggnccnaarggnttyccnggnathwsnggnccnccnggnttyccnggnytnggnacnacnggngaraarggngaraarggngaraarggnathccnggnytnccnggnccnmgnggnccnatgggnwsngarggngtncarggnccnccnggncarcarggnaaraarggnacnytnggnttyccnggnytnaayggnttycarggnathgarggncaraarggngayathggnytnccnggnccngaygtnttyathgayathgayggngcngtnathwsnggnaayccnggngayccnggngtnccnggnytnccnggnytnaarggngaygarggnathcarggnytnmgnggnccnwsnggngtnccnggnytnccngcnytnwsnggngtnccnggngcnytnggnccncarggnttyccnggnytnaarggngaycarggnaayccnggnmgnacnacnathggngcngcnggnytnccnggnmgngayggnytnccnggnccnccnggnccnccnggnccnccnwsnccngarttygaracngaracnytncayaayaargarwsnggnttyccnggnytnmgnggngarcarggnccnaarggnaayytnggnytnaarggnathaarggngaywsnggnttytgygcntgygayggnggngtnccnaayacnggnccnccnggngarccnggnccnccnggnccntggggnytnathggnytnccnggnytnaarggngcnmgnggngaymgnggnwsnggnggngcncarggnccngcnggngcnccnggnytngtnggnccnytnggnccnwsnggnccnaarggnaaraarggngarccnathytnwsnacnathcarggnatgccnggngaymgnggngaywsnggnwsncarggnttymgnggngtnathggngarccnggnaargayggngtnccnggnytnccnggnytnccnggnytnccnggngayggnggncarggnttyccnggngaraarggnytnccnggnytnccnggngaraarggncayccnggnccnccnggnytnccnggnaayggnytnccnggnytnccnggnccnmgnggnytnccnggngayaarggnaargayggnytnccnggncarcarggnytnccnggnwsnaarggnathacnytnccntgyathathccnggnwsntayggnccnwsnggnttyccnggnacnccnggnttyccnggnccnaarggnwsnmgnggnytnccnggnacnccnggncarccnggnwsnwsnggnwsnaarggngarccnggnwsnccnggnytngtncayytnccngarytnccnggnttyccnggnccnmgnggngaraarggnytnccnggnttyccnggnytnccnggnaargayggnytnccnggnatgathggnwsnccnggnytnccnggnwsnaarggngcnacnggngayathttyggngcngaraayggngcnccnggngarcarggnytncarggnytnacnggncayaarggnttyytnggngaywsnggnytnccnggnytnaarggngtncayggnaarccnggnytnytnggnccnaarggngarmgnggnwsnccnggnacnccnggncargtnggncarccnggnacnccnggnwsnwsnggnccntayggnathaarggnaarwsnggnytnccnggngcnccnggnttyccnggnathwsnggncayccnggnaaraarggnacnmgnggnaaraarggnccnccnggnwsnathgtnaaraarggnytnccnggnytnaarggnytnccnggnaayccnggnytngtnggnytnaarggnwsnccnggnwsnccnggngtngcnggnytnccngcnytnwsnggnccnaarggngaraarggnwsngtnggnttygtnggnttyccnggnathccnggnytnccnggnathccnggnacnmgnggnytnaarggnathccnggnwsnacnggnaaratgggnccnwsnggnmgngcnggnacnccnggngaraarggngaymgnggnaayccnggnccngtnggnathccnwsnccnmgnmgnccnatgwsnaayytntggytnaarggngayaarggnwsncarggnwsngcnggnwsnaayggnttyccnggnccnmgnggngayaarggngargcnggnmgnccnggnccnccnggnytnccnggngcnccnggnytnccnggnathathaarggngtnwsnggnaarccnggnccnccnggnttyatgggnathmgnggnytnccnggnytnaarggnwsnwsnggnathacnggnttyccnggnatgccnggngarwsnggnwsncarggnathmgnggnwsnccnggnytnccnggngcnwsnggnytnccnggnytnaarggngayaayggncaracngtngarathwsnggnwsnccnggnccnaarggncarccnggngarwsnggnttyaarggnacnaarggnmgngayggnytnathggnaayathggnttyccnggnaayaarggngargayggnaargtnggngtnwsnggngaygtnggnytnccnggngcnccnggnttyccnggngtngcnggnatgmgnggngarccnggnytnccnggnwsnwsnggncaycarggngcnathggnccnytnggnwsnccnggnytnathggnccnaarggnttyccnggnttyccnggnytncayggnytnaayggnytnccnggnacnaarggnacncayggnacnccnggnccnwsnathacnggngtnccnggnccngcnggnytnccnggnccnaarggngaraarggntayccnggnathggnathggngcnccnggnaarccnggnytnmgnggncaraarggngaymgnggnttyccnggnytncarggnccngcnggnytnccnggngcnccnggnathwsnytnccnwsnytnathgcnggncarccnggngayccnggnmgnccnggnytngayggngarmgnggnmgnccnggnccngcnggnccnccnggnccnccnggnccnwsnwsnaaycarggngayacnggngayccnggnttyccnggnathccnggnccnaarggnccnaarggngaycarggnathccnggnttywsnggnytnccnggngarytnggnytnaarggnatgmgnggngarccnggnttyatgggnacnccnggnaargtnggnccnccnggngayccnggnttyccnggnatgaarggnaargcnggnccnmgnggnwsnwsnggnytncarggngayccnggncaracnccnacngcngargcngtncargtnccnccnggnccnytnggnytnccnggnathgayggnathccnggnytnacnggngayccnggngcncarggnccngtnggnytncarggnwsnaarggnytnccnggnathccnggnaargayggnccnwsnggnytnccnggnccnccnggngcnytnggngayccnggnytnccnggnytncarggnccnccnggnttygarggngcnccnggncarcarggnccnttyggnatgccnggnatgccnggncarwsn

SEQ ID NO: 1106 - DNA, 3042 bp, Artificial Sequence
  hCol-CNA11 (alpha1(V) THD)
  misc_feature (3)..(3): n is a, c, g, or t
  misc_feature (6)..(6): n is a, c, g, or t
  misc_feature (9)..(9): n is a, c, g, or t
  misc_feature (12)..(12): n is a, c, g, or t
  misc_feature (15)..(15): n is a, c, g, or t
  misc_feature (21)..(21): n is a, c, g, or t
  misc_feature (24)..(24): n is a, c, g, or t
  misc_feature (27)..(27): n is a, c, g, or t
  misc_feature (30)..(30): n is a, c, g, or t
  misc_feature (33)..(33): n is a, c, g, or t
  misc_feature (36)..(36): n is a, c, g, or t
  misc_feature (39)..(39): n is a, c, g, or t
  misc_feature (42)..(42): n is a, c, g, or t
  misc_feature (45)..(45): n is a, c, g, or t
  misc_feature (48)..(48): n is a, c, g, or t
  misc_feature (51)..(51): n is a, c, g, or t
  misc_feature (54)..(54): n is a, c, g, or t
  misc_feature (57)..(57): n is a, c, g, or t
  misc_feature (60)..(60): n is a, c, g, or t
  misc_feature (63)..(63): n is a, c, g, or t
  misc_feature (66)..(66): n is a, c, g, or t
  misc_feature (69)..(69): n is a, c, g, or t
  misc_feature (75)..(75): n is a, c, g, or t
  misc_feature (81)..(81): n is a, c, g, or t
  misc_feature (84)..(84): n is a, c, g, or t
  misc_feature (90)..(90): n is a, c, g, or t
  misc_feature (93)..(93): n is a, c, g, or t
  misc_feature (96)..(96): n is a, c, g, or t
  misc_feature (102)..(102): n is a, c, g, or t
  misc_feature (105)..(105): n is a, c, g, or t
  misc_feature (108)..(108): n is a, c, g, or t
  misc_feature (111)..(111): n is a, c, g, or t
  misc_feature (114)..(114): n is a, c, g, or t
  misc_feature (120)..(120): n is a, c, g, or t
  misc_feature (123)..(123): n is a, c, g, or t
  misc_feature (126)..(126): n is a, c, g, or t
  misc_feature (129)..(129): n is a, c, g, or t
  misc_feature (132)..(132): n is a, c, g, or t
  misc_feature (135)..(135): n is a, c, g, or t
  misc_feature (138)..(138): n is a, c, g, or t
  misc_feature (144)..(144): n is a, c, g, or t
  misc_feature (147)..(147): n is a, c, g, or t
  misc_feature (150)..(150): n is a, c, g, or t
  misc_feature (153)..(153): n is a, c, g, or t
  misc_feature (156)..(156): n is a, c, g, or t
  misc_feature (159)..(159): n is a, c, g, or t
  misc_feature (162)..(162): n is a, c, g, or t
  misc_feature (165)..(165): n is a, c, g, or t
  misc_feature (168)..(168): n is a, c, g, or t
  misc_feature (174)..(174): n is a, c, g, or t
  misc_feature (177)..(177): n is a, c, g, or t
  misc_feature (180)..(180): n is a, c, g, or t
  misc_feature (183)..(183): n is a, c, g, or t
  misc_feature (189)..(189): n is a, c, g, or t
  misc_feature (192)..(192): n is a, c, g, or t
  misc_feature (198)..(198): n is a, c, g, or t
  misc_feature (201)..(201): n is a, c, g, or t
  misc_feature (204)..(204): n is a, c, g, or t
  misc_feature (210)..(210): n is a, c, g, or t
  misc_feature (216)..(216): n is a, c, g, or t
  misc_feature (219)..(219): n is a, c, g, or t
  misc_feature (228)..(228): n is a, c, g, or t
  misc_feature (231)..(231): n is a, c, g, or t
  misc_feature (234)..(234): n is a, c, g, or t
  misc_feature (237)..(237): n is a, c, g, or t
  misc_feature (240)..(240): n is a, c, g, or t
  misc_feature (243)..(243): n is a, c, g, or t
  misc_feature (246)..(246): n is a, c, g, or t
  misc_feature (255)..(255): n is a, c, g, or t
  misc_feature (261)..(261): n is a, c, g, or t
  misc_feature (264)..(264): n is a, c, g, or t
  misc_feature (270)..(270): n is a, c, g, or t
  misc_feature (273)..(273): n is a, c, g, or t
  misc_feature (276)..(276): n is a, c, g, or t
  misc_feature (279)..(279): n is a, c, g, or t
  misc_feature (282)..(282): n is a, c, g, or t
  misc_feature (285)..(285): n is a, c, g, or t
  misc_feature (288)..(288): n is a, c, g, or t
  misc_feature (291)..(291): n is a, c, g, or t
  misc_feature (294)..(294): n is a, c, g, or t
  misc_feature (297)..(297): n is a, c, g, or t
  misc_feature (300)..(300): n is a, c, g, or t
  misc_feature (309)..(309): n is a, c, g, or t
  misc_feature (315)..(315): n is a, c, g, or t
  misc_feature (318)..(318): n is a, c, g, or t
  misc_feature (327)..(327): n is a, c, g, or t
  misc_feature (333)..(333): n is a, c, g, or t
  misc_feature (336)..(336): n is a, c, g, or t
  misc_feature (339)..(339): n is a, c, g, or t
  misc_feature (342)..(342): n is a, c, g, or t
  misc_feature (345)..(345): n is a, c, g, or t
  misc_feature (348)..(348): n is a, c, g, or t
  misc_feature (351)..(351): n is a, c, g, or t
  misc_feature (354)..(354): n is a, c, g, or t
  misc_feature (360)..(360): n is a, c, g, or t
  misc_feature (363)..(363): n is a, c, g, or t
  misc_feature (366)..(366): n is a, c, g, or t
  misc_feature (369)..(369): n is a, c, g, or t
  misc_feature (372)..(372): n is a, c, g, or t
  misc_feature (375)..(375): n is a, c, g, or t
  misc_feature (378)..(378): n is a, c, g, or t
  misc_feature (381)..(381): n is a, c, g, or t
  misc_feature (384)..(384): n is a, c, g, or t
  misc_feature (390)..(390): n is a, c, g, or t
  misc_feature (393)..(393): n is a, c, g, or t
  misc_feature (396)..(396): n is a, c, g, or t
  misc_feature (399)..(399): n is a, c, g, or t
  misc_feature (402)..(402): n is a, c, g, or t
  misc_feature (405)..(405): n is a, c, g, or t
  misc_feature (408)..(408): n is a, c, g, or t
  misc_feature (411)..(411): n is a, c, g, or t
  misc_feature (414)..(414): n is a, c, g, or t
  misc_feature (417)..(417): n is a, c, g, or t
  misc_feature (420)..(420): n is a, c, g, or t
  misc_feature (423)..(423): n is a, c, g, or t
  misc_feature (426)..(426): n is a, c, g, or t
  misc_feature (435)..(435): n is a, c, g, or t
  misc_feature (441)..(441): n is a, c, g, or t
  misc_feature (444)..(444): n is a, c, g, or t
  misc_feature (447)..(447): n is a, c, g, or t
  misc_feature (453)..(453): n is a, c, g, or t
  misc_feature (459)..(459): n is a, c, g, or t
  misc_feature (462)..(462): n is a, c, g, or t
  misc_feature (465)..(465): n is a, c, g, or t
  misc_feature (471)..(471): n is a, c, g, or t
  misc_feature (477)..(477): n is a, c, g, or t
  misc_feature (480)..(480): n is a, c, g, or t
  misc_feature (483)..(483): n is a, c, g, or t
  misc_feature (486)..(486): n is a, c, g, or t
  misc_feature (489)..(489): n is a, c, g, or t
  misc_feature (498)..(498): n is a, c, g, or t
  misc_feature (504)..(504): n is a, c, g, or t
  misc_feature (507)..(507): n is a, c, g, or t
  misc_feature (510)..(510): n is a, c, g, or t
  misc_feature (516)..(516): n is a, c, g, or t
  misc_feature (519)..(519): n is a, c, g, or t
  misc_feature (522)..(522): n is a, c, g, or t
  misc_feature (525)..(525): n is a, c, g, or t
  misc_feature (528)..(528): n is a, c, g, or t
  misc_feature (534)..(534): n is a, c, g, or t
  misc_feature (537)..(537): n is a, c, g, or t
  misc_feature (543)..(543): n is a, c, g, or t
  misc_feature (546)..(546): n is a, c, g, or t
  misc_feature (549)..(549): n is a, c, g, or t
  misc_feature (552)..(552): n is a, c, g, or t
  misc_feature (561)..(561): n is a, c, g, or t
  misc_feature (564)..(564): n is a, c, g, or t
  misc_feature (567)..(567): n is a, c, g, or t
  misc_feature (570)..(570): n is a, c, g, or t
  misc_feature (576)..(576): n is a, c, g, or t
  misc_feature (579)..(579): n is a, c, g, or t
  misc_feature (582)..(582): n is a, c, g, or t
  misc_feature (585)..(585): n is a, c, g, or t
  misc_feature (588)..(588): n is a, c, g, or t
  misc_feature (594)..(594): n is a, c, g, or t
  misc_feature (597)..(597): n is a, c, g, or t
  misc_feature (600)..(600): n is a, c, g, or t
  misc_feature (606)..(606): n is a, c, g, or t
  misc_feature (609)..(609): n is a, c, g, or t
  misc_feature (612)..(612): n is a, c, g, or t
  misc_feature (615)..(615): n is a, c, g, or t
  misc_feature (621)..(621): n is a, c, g, or t
  misc_feature (624)..(624): n is a, c, g, or t
  misc_feature (633)..(633): n is a, c, g, or t
  misc_feature (636)..(636): n is a, c, g, or t
  misc_feature (639)..(639): n is a, c, g, or t
  misc_feature (642)..(642): n is a, c, g, or t
  misc_feature (651)..(651): n is a, c, g, or t
  misc_feature (654)..(654): n is a, c, g, or t
  misc_feature (660)..(660): n is a, c, g, or t
  misc_feature (663)..(663): n is a, c, g, or t
  misc_feature (666)..(666): n is a, c, g, or t
  misc_feature (669)..(669): n is a, c, g, or t
  misc_feature (672)..(672): n is a, c, g, or t
  misc_feature (678)..(678): n is a, c, g, or t
  misc_feature (681)..(681): n is a, c, g, or t
  misc_feature (687)..(687): n is a, c, g, or t
  misc_feature (693)..(693): n is a, c, g, or t
  misc_feature (696)..(696): n is a, c, g, or t
  misc_feature (699)..(699): n is a, c, g, or t
  misc_feature (702)..(702): n is a, c, g, or t
  misc_feature (705)..(705): n is a, c, g, or t
  misc_feature (708)..(708): n is a, c, g, or t
  misc_feature (714)..(714): n is a, c, g, or t
  misc_feature (717)..(717): n is a, c, g, or t
  misc_feature (723)..(723): n is a, c, g, or t
  misc_feature (729)..(729): n is a, c, g, or t
  misc_feature (732)..(732): n is a, c, g, or t
  misc_feature (735)..(735): n is a, c, g, or t
  misc_feature (741)..(741): n is a, c, g, or t
  misc_feature (744)..(744): n is a, c, g, or t
  misc_feature (750)..(750): n is a, c, g, or t
  misc_feature (759)..(759): n is a, c, g, or t
  misc_feature (768)..(768): n is a, c, g, or t
  misc_feature (774)..(774): n is a, c, g, or t
  misc_feature (777)..(777): n is a, c, g, or t
  misc_feature (786)..(786): n is a, c, g, or t
  misc_feature (795)..(795): n is a, c, g, or t
  misc_feature (804)..(804): n is a, c, g, or t
  misc_feature (810)..(810): n is a, c, g, or t
  misc_feature (813)..(813): n is a, c, g, or t
  misc_feature (822)..(822): n is a, c, g, or t
  misc_feature (825)..(825): n is a, c, g, or t
  misc_feature (828)..(828): n is a, c, g, or t
  misc_feature (831)..(831): n is a, c, g, or t
  misc_feature (834)..(834): n is a, c, g, or t
  misc_feature (837)..(837): n is a, c, g, or t
  misc_feature (840)..(840): n is a, c, g, or t
  misc_feature (849)..(849): n is a, c, g, or t
  misc_feature (852)..(852): n is a, c, g, or t
  misc_feature (858)..(858): n is a, c, g, or t
  misc_feature (861)..(861): n is a, c, g, or t
  misc_feature (867)..(867): n is a, c, g, or t
  misc_feature (870)..(870): n is a, c, g, or t
  misc_feature (873)..(873): n is a, c, g, or t
  misc_feature (876)..(876): n is a, c, g, or t
  misc_feature (879)..(879): n is a, c, g, or t
  misc_feature (885)..(885): n is a, c, g, or t
  misc_feature (891)..(891): n is a, c, g, or t
  misc_feature (894)..(894): n is a, c, g, or t
  misc_feature (897)..(897): n is a, c, g, or t
  misc_feature (900)..(900): n is a, c, g, or t
  misc_feature (903)..(903): n is a, c, g, or t
  misc_feature (906)..(906): n is a, c, g, or t
  misc_feature (909)..(909): n is a, c, g, or t
  misc_feature (912)..(912): n is a, c, g, or t
  misc_feature (921)..(921): n is a, c, g, or t
  misc_feature (927)..(927): n is a, c, g, or t
  misc_feature (930)..(930): n is a, c, g, or t
  misc_feature (933)..(933): n is a, c, g, or t
  misc_feature (936)..(936): n is a, c, g, or t
  misc_feature (939)..(939): n is a, c, g, or t
  misc_feature (942)..(942): n is a, c, g, or t
  misc_feature (945)..(945): n is a, c, g, or t
  misc_feature (948)..(948): n is a, c, g, or t
  misc_feature (954)..(954): n is a, c, g, or t
  misc_feature (957)..(957): n is a, c, g, or t
  misc_feature (960)..(960): n is a, c, g, or t
  misc_feature (966)..(966): n is a, c, g, or t
  misc_feature (969)..(969): n is a, c, g, or t
  misc_feature (975)..(975): n is a, c, g, or t
  misc_feature (978)..(978): n is a, c, g, or t
  misc_feature (984)..(984): n is a, c, g, or t
  misc_feature (990)..(990): n is a, c, g, or t
  misc_feature (993)..(993): n is a, c, g, or t
  misc_feature (999)..(999): n is a, c, g, or t
  misc_feature (1002)..(1002): n is a, c, g, or t
  misc_feature (1005)..(1005): n is a, c, g, or t
  misc_feature (1011)..(1011): n is a, c, g, or t
  misc_feature (1020)..(1020): n is a, c, g, or t
  misc_feature (1023)..(1023): n is a, c, g, or t
  misc_feature (1026)..(1026): n is a, c, g, or t
  misc_feature (1029)..(1029): n is a, c, g, or t
  misc_feature (1032)..(1032): n is a, c, g, or t
  misc_feature (1035)..(1035): n is a, c, g, or t
  misc_feature (1038)..(1038): n is a, c, g, or t
  misc_feature (1044)..(1044): n is a, c, g, or t
  misc_feature (1047)..(1047): n is a, c, g, or t
  misc_feature (1050)..(1050): n is a, c, g, or t
  misc_feature (1053)..(1053): n is a, c, g, or t
  misc_feature (1056)..(1056): n is a, c, g, or t
  misc_feature (1062)..(1062): n is a, c, g, or t
  misc_feature (1065)..(1065): n is a, c, g, or t
  misc_feature (1068)..(1068): n is a, c, g, or t
  misc_feature (1071)..(1071): n is a, c, g, or t
  misc_feature (1074)..(1074): n is a, c, g, or t
  misc_feature (1077)..(1077): n is a, c, g, or t
  misc_feature (1080)..(1080): n is a, c, g, or t
  misc_feature (1083)..(1083): n is a, c, g, or t
  misc_feature (1089)..(1089): n is a, c, g, or t
  misc_feature (1092)..(1092): n is a, c, g, or t
  misc_feature (1095)..(1095): n is a, c, g, or t
  misc_feature (1098)..(1098): n is a, c, g, or t
  misc_feature (1101)..(1101): n is a, c, g, or t
  misc_feature (1107)..(1107): n is a, c, g, or t
  misc_feature (1110)..(1110): n is a, c, g, or t
  misc_feature (1116)..(1116): n is a, c, g, or t
  misc_feature (1119)..(1119): n is a, c, g, or t
  misc_feature (1122)..(1122): n is a, c, g, or t
  misc_feature (1128)..(1128): n is a, c, g, or t
  misc_feature (1134)..(1134): n is a, c, g, or t
  misc_feature (1137)..(1137): n is a, c, g, or t
  misc_feature (1140)..(1140): n is a, c, g, or t
  misc_feature (1146)..(1146): n is a, c, g, or t
  misc_feature (1149)..(1149): n is a, c, g, or t
  misc_feature (1152)..(1152): n is a, c, g, or t
  misc_feature (1155)..(1155): n is a, c, g, or t
  misc_feature (1158)..(1158): n is a, c, g, or t
  misc_feature (1161)..(1161): n is a, c, g, or t
  misc_feature (1164)..(1164): n is a, c, g, or t
  misc_feature (1170)..(1170): n is a, c, g, or t
  misc_feature (1173)..(1173): n is a, c, g, or t
  misc_feature (1176)..(1176): n is a, c, g, or t
  misc_feature (1182)..(1182): n is a, c, g, or t
  misc_feature (1185)..(1185): n is a, c, g, or t
  misc_feature (1191)..(1191): n is a, c, g, or t
  misc_feature (1194)..(1194): n is a, c, g, or t
  misc_feature (1197)..(1197): n is a, c, g, or t
  misc_feature (1200)..(1200): n is a, c, g, or t
  misc_feature (1206)..(1206): n is a, c, g, or t
  misc_feature (1209)..(1209): n is a, c, g, or t
  misc_feature (1212)..(1212): n is a, c, g, or t
  misc_feature (1218)..(1218): n is a, c, g, or t
  misc_feature (1221)..(1221): n is a, c, g, or t
  misc_feature (1224)..(1224): n is a, c, g, or t
  misc_feature (1227)..(1227): n is a, c, g, or t
  misc_feature (1230)..(1230): n is a, c, g, or t
  misc_feature (1233)..(1233): n is a, c, g, or t
  misc_feature (1236)..(1236): n is a, c, g, or t
  misc_feature (1245)..(1245): n is a, c, g, or t
  misc_feature (1248)..(1248): n is a, c, g, or t
  misc_feature (1251)..(1251): n is a, c, g, or t
  misc_feature (1254)..(1254): n is a, c, g, or t
  misc_feature (1260)..(1260): n is a, c, g, or t
  misc_feature (1263)..(1263): n is a, c, g, or t
  misc_feature (1269)..(1269): n is a, c, g, or t
  misc_feature (1272)..(1272): n is a, c, g, or t
  misc_feature (1278)..(1278): n is a, c, g, or t
  misc_feature (1281)..(1281): n is a, c, g, or t
  misc_feature (1290)..(1290): n is a, c, g, or t
  misc_feature (1296)..(1296): n is a, c, g, or t
  misc_feature (1299)..(1299): n is a, c, g, or t
  misc_feature (1302)..(1302): n is a, c, g, or t
  misc_feature (1305)..(1305): n is a, c, g, or t
  misc_feature (1308)..(1308): n is a, c, g, or t
  misc_feature (1311)..(1311): n is a, c, g, or t
  misc_feature (1314)..(1314): n is a, c, g, or t
  misc_feature (1317)..(1317): n is a, c, g, or t
  misc_feature (1320)..(1320): n is a, c, g, or t
  misc_feature (1323)..(1323): n is a, c, g, or t
  misc_feature (1326)..(1326): n is a, c, g, or t
  misc_feature (1329)..(1329): n is a, c, g, or t
  misc_feature (1335)..(1335): n is a, c, g, or t
  misc_feature (1338)..(1338): n is a, c, g, or t
  misc_feature (1341)..(1341): n is a, c, g, or t
  misc_feature (1344)..(1344): n is a, c, g, or t
  misc_feature (1350)..(1350): n is a, c, g, or t
  misc_feature (1353)..(1353): n is a, c, g, or t
  misc_feature (1356)..(1356): n is a, c, g, or t
  misc_feature (1362)..(1362): n is a, c, g, or t
  misc_feature (1368)..(1368): n is a, c, g, or t
  misc_feature (1371)..(1371): n is a, c, g, or t
  misc_feature (1377)..(1377): n is a, c, g, or t
  misc_feature (1380)..(1380): n is a, c, g, or t
  misc_feature (1383)..(1383): n is a, c, g, or t
  misc_feature (1386)..(1386): n is a, c, g, or t
  misc_feature (1389)..(1389): n is a, c, g, or t
  misc_feature (1392)..(1392): n is a, c, g, or t
  misc_feature (1395)..(1395): n is a, c, g, or t
  misc_feature (1398)..(1398): n is a, c, g, or t
  misc_feature (1407)..(1407): n is a, c, g, or t
  misc_feature (1410)..(1410): n is a, c, g, or t
  misc_feature (1413)..(1413): n is a, c, g, or t
  misc_feature (1416)..(1416): n is a, c, g, or t
  misc_feature (1419)..(1419): n is a, c, g, or t
  misc_feature (1422)..(1422): n is a, c, g, or t
  misc_feature (1425)..(1425): n is a, c, g, or t
  misc_feature (1434)..(1434): n is a, c, g, or t
  misc_feature (1437)..(1437): n is a, c, g, or t
  misc_feature (1443)..(1443): n is a, c, g, or t
  misc_feature (1449)..(1449): n is a, c, g, or t
  misc_feature (1452)..(1452): n is a, c, g, or t
  misc_feature (1455)..(1455): n is a, c, g, or t
  misc_feature (1458)..(1458): n is a, c, g, or t
  misc_feature (1461)..(1461): n is a, c, g, or t
  misc_feature (1464)..(1464): n is a, c, g, or t
  misc_feature (1467)..(1467): n is a, c, g, or t
  misc_feature (1470)..(1470): n is a, c, g, or t
  misc_feature (1479)..(1479): n is a, c, g, or t
  misc_feature (1482)..(1482): n is a, c, g, or t
  misc_feature (1485)..(1485): n is a, c, g, or t
  misc_feature (1488)..(1488): n is a, c, g, or t
  misc_feature (1491)..(1491): n is a, c, g, or t
  misc_feature (1494)..(1494): n is a, c, g, or t
  misc_feature (1497)..(1497): n is a, c, g, or t
  misc_feature (1503)..(1503): n is a, c, g, or t
  misc_feature (1506)..(1506): n is a, c, g, or t
  misc_feature (1512)..(1512): n is a, c, g, or t
  misc_feature (1515)..(1515): n is a, c, g, or t
  misc_feature (1518)..(1518): n is a, c, g, or t
  misc_feature (1521)..(1521): n is a, c, g, or t
  misc_feature (1524)..(1524): n is a, c, g, or t
  misc_feature (1527)..(1527): n is a, c, g, or t
  misc_feature (1530)..(1530): n is a, c, g, or t
  misc_feature (1533)..(1533): n is a, c, g, or t
  misc_feature (1536)..(1536): n is a, c, g, or t
  misc_feature (1539)..(1539): n is a, c, g, or t
  misc_feature (1542)..(1542): n is a, c, g, or t
  misc_feature (1545)..(1545): n is a, c, g, or t
  misc_feature (1551)..(1551): n is a, c, g, or t
  misc_feature (1560)..(1560): n is a, c, g, or t
  misc_feature (1563)..(1563): n is a, c, g, or t
  misc_feature (1566)..(1566): n is a, c, g, or t
  misc_feature (1569)..(1569): n is a, c, g, or t
  misc_feature (1572)..(1572): n is a, c, g, or t
  misc_feature (1575)..(1575): n is a, c, g, or t
  misc_feature (1578)..(1578): n is a, c, g, or t
  misc_feature (1581)..(1581): n is a, c, g, or t
  misc_feature (1584)..(1584): n is a, c, g, or t
  misc_feature (1587)..(1587): n is a, c, g, or t
  misc_feature (1590)..(1590): n is a, c, g, or t
  misc_feature (1593)..(1593): n is a, c, g, or t
  misc_feature (1596)..(1596): n is a, c, g, or t
  misc_feature (1602)..(1602): n is a, c, g, or t
  misc_feature (1605)..(1605): n is a, c, g, or t
  misc_feature (1608)..(1608): n is a, c, g, or t
  misc_feature (1611)..(1611): n is a, c, g, or t
  misc_feature (1614)..(1614): n is a, c, g, or t
  misc_feature (1617)..(1617): n is a, c, g, or t
  misc_feature (1620)..(1620): n is a, c, g, or t
  misc_feature (1623)..(1623): n is a, c, g, or t
  misc_feature (1626)..(1626): n is a, c, g, or t
  misc_feature (1632)..(1632): n is a, c, g, or t
  misc_feature (1638)..(1638): n is a, c, g, or t
  misc_feature (1641)..(1641): n is a, c, g, or t
  misc_feature (1644)..(1644): n is a, c, g, or t
  misc_feature (1647)..(1647): n is a, c, g, or t
  misc_feature (1650)..(1650): n is a, c, g, or t
  misc_feature (1653)..(1653): n is a, c, g, or t
  misc_feature (1659)..(1659): n is a, c, g, or t
  misc_feature (1662)..(1662): n is a, c, g, or t
  misc_feature (1665)..(1665): n is a, c, g, or t
  misc_feature (1668)..(1668): n is a, c, g, or t
  misc_feature (1671)..(1671): n is a, c, g, or t
  misc_feature (1674)..(1674): n is a, c, g, or t
  misc_feature (1677)..(1677): n is a, c, g, or t
  misc_feature (1686)..(1686): n is a, c, g, or t
  misc_feature (1689)..(1689): n is a, c, g, or t
  misc_feature (1692)..(1692): n is a, c, g, or t
  misc_feature (1695)..(1695): n is a, c, g, or t
  misc_feature (1704)..(1704): n is a, c, g, or t
  misc_feature (1707)..(1707): n is a, c, g, or t
  misc_feature (1713)..(1713): n is a, c, g, or t
  misc_feature (1716)..(1716): n is a, c, g, or t
  misc_feature (1719)..(1719): n is a, c, g, or t
  misc_feature (1722)..(1722): n is a, c, g, or t
  misc_feature (1725)..(1725): n is a, c, g, or t
  misc_feature (1731)..(1731): n is a, c, g, or t
  misc_feature (1734)..(1734): n is a, c, g, or t
  misc_feature (1740)..(1740): n is a, c, g, or t
  misc_feature (1743)..(1743): n is a, c, g, or t
  misc_feature (1746)..(1746): n is a, c, g, or t
  misc_feature (1749)..(1749): n is a, c, g, or t
  misc_feature (1752)..(1752): n is a, c, g, or t
  misc_feature (1755)..(1755): n is a, c, g, or t
  misc_feature (1758)..(1758): n is a, c, g, or t
  misc_feature (1761)..(1761): n is a, c, g, or t
  misc_feature (1764)..(1764): n is a, c, g, or t
  misc_feature (1767)..(1767): n is a, c, g, or t
  misc_feature (1770)..(1770): n is a, c, g, or t
  misc_feature (1773)..(1773): n is a, c, g, or t
  misc_feature (1776)..(1776): n is a, c, g, or t
  misc_feature (1779)..(1779): n is a, c, g, or t
  misc_feature (1782)..(1782): n is a, c, g, or t
  misc_feature (1785)..(1785): n is a, c, g, or t
  misc_feature (1794)..(1794): n is a, c, g, or t
  misc_feature (1803)..(1803): n is a, c, g, or t
  misc_feature (1812)..(1812): n is a, c, g, or t
  misc_feature (1818)..(1818): n is a, c, g, or t
  misc_feature (1821)..(1821): n is a, c, g, or t
  misc_feature (1830)..(1830): n is a, c, g, or t
  misc_feature (1833)..(1833): n is a, c, g, or t
  misc_feature (1839)..(1839): n is a, c, g, or t
  misc_feature (1848)..(1848): n is a, c, g, or t
  misc_feature (1857)..(1857): n is a, c, g, or t
  misc_feature (1860)..(1860): n is a, c, g, or t
  misc_feature (1863)..(1863): n is a, c, g, or t
  misc_feature (1866)..(1866): n is a, c, g, or t
  misc_feature (1869)..(1869): n is a, c, g, or t
  misc_feature (1872)..(1872): n is a, c, g, or t
  misc_feature (1875)..(1875): n is a, c, g, or t
  misc_feature (1878)..(1878): n is a, c, g, or t
  misc_feature (1884)..(1884): n is a, c, g, or t
  misc_feature (1887)..(1887): n is a, c, g, or t
  misc_feature (1893)..(1893): n is a, c, g, or t
  misc_feature (1899)..(1899): n is a, c, g, or t
  misc_feature (1902)..(1902): n is a, c, g, or t
  misc_feature (1905)..(1905): n is a, c, g, or t
  misc_feature (1908)..(1908): n is a, c, g, or t
  misc_feature (1911)..(1911): n is a, c, g, or t
  misc_feature (1914)..(1914): n is a, c, g, or t
  misc_feature (1920)..(1920): n is a, c, g, or t
  misc_feature (1926)..(1926): n is a, c, g, or t
  misc_feature (1929)..(1929): n is a, c, g, or t
  misc_feature (1932)..(1932): n is a, c, g, or t
  misc_feature (1935)..(1935): n is a, c, g, or t
  misc_feature (1938)..(1938): n is a, c, g, or t
  misc_feature (1947)..(1947): n is a, c, g, or t
  misc_feature (1950)..(1950): n is a, c, g, or t
  misc_feature (1956)..(1956): n is a, c, g, or t
  misc_feature (1965)..(1965): n is a, c, g, or t
  misc_feature (1974)..(1974): n is a, c, g, or t
  misc_feature (1977)..(1977): n is a, c, g, or t
  misc_feature (1980)..(1980): n is a, c, g, or t
  misc_feature (1983)..(1983): n is a, c, g, or t
  misc_feature (1989)..(1989): n is a, c, g, or t
  misc_feature (1992)..(1992): n is a, c, g, or t
  misc_feature (1995)..(1995): n is a, c, g, or t
  misc_feature (1998)..(1998): n is a, c, g, or t
  misc_feature (2001)..(2001): n is a, c, g, or t
  misc_feature (2004)..(2004): n is a, c, g, or t
  misc_feature (2007)..(2007): n is a, c, g, or t
  misc_feature (2010)..(2010): n is a, c, g, or t
  misc_feature (2013)..(2013): n is a, c, g, or t
  misc_feature (2019)..(2019): n is a, c, g, or t
  misc_feature (2022)..(2022): n is a, c, g, or t
  misc_feature (2025)..(2025): n is a, c, g, or t
  misc_feature (2028)..(2028): n is a, c, g, or t
  misc_feature (2031)..(2031): n is a, c, g, or t
  misc_feature (2034)..(2034): n is a, c, g, or t
  misc_feature (2037)..(2037): n is a, c, g, or t
  misc_feature (2046)..(2046): n is a, c, g, or t
  misc_feature (2052)..(2052): n is a, c, g, or t
  misc_feature (2055)..(2055): n is a, c, g, or t
  misc_feature (2061)..(2061): n is a, c, g, or t
  misc_feature (2064)..(2064): n is a, c, g, or t
  misc_feature (2073)..(2073): n is a, c, g, or t
  misc_feature (2076)..(2076): n is a, c, g, or t
  misc_feature (2079)..(2079): n is a, c, g, or t
  misc_feature (2082)..(2082): n is a, c, g, or t
  misc_feature (2085)..(2085): n is a, c, g, or t
  misc_feature (2088)..(2088): n is a, c, g, or t
  misc_feature (2091)..(2091): n is a, c, g, or t
  misc_feature (2094)..(2094): n is a, c, g, or t
  misc_feature (2097)..(2097): n is a, c, g, or t
  misc_feature (2100)..(2100): n is a, c, g, or t
  misc_feature (2103)..(2103): n is a, c, g, or t
  misc_feature (2106)..(2106): n is a, c, g, or t
  misc_feature (2109)..(2109): n is a, c, g, or t
  misc_feature (2112)..(2112): n is a, c, g, or t
  misc_feature (2115)..(2115): n is a, c, g, or t
  misc_feature (2118)..(2118): n is a, c, g, or t
  misc_feature (2121)..(2121): n is a, c, g, or t
  misc_feature (2127)..(2127): n is a, c, g, or t
  misc_feature (2130)..(2130): n is a, c, g, or t
  misc_feature (2136)..(2136): n is a, c, g, or t
  misc_feature (2139)..(2139): n is a, c, g, or t
  misc_feature (2142)..(2142): n is a, c, g, or t
  misc_feature (2145)..(2145): n is a, c, g, or t
  misc_feature (2148)..(2148): n is a, c, g, or t
  misc_feature (2154)..(2154): n is a, c, g, or t
  misc_feature (2160)..(2160): n is a, c, g, or t
  misc_feature (2163)..(2163): n is a, c, g, or t
  misc_feature (2166)..(2166): n is a, c, g, or t
  misc_feature (2169)..(2169): n is a, c, g, or t
  misc_feature (2172)..(2172): n is a, c, g, or t
  misc_feature (2181)..(2181): n is a, c, g, or t
  misc_feature (2187)..(2187): n is a, c, g, or t
  misc_feature (2190)..(2190): n is a, c, g, or t
  misc_feature (2196)..(2196): n is a, c, g, or t
  misc_feature (2199)..(2199): n is a, c, g, or t
  misc_feature (2205)..(2205): n is a, c, g, or t
  misc_feature (2208)..(2208): n is a, c, g, or t
  misc_feature (2211)..(2211): n is a, c, g, or t
  misc_feature (2214)..(2214): n is a, c, g, or t
  misc_feature (2217)..(2217): n is a, c, g, or t
  misc_feature (2223)..(2223): n is a, c, g, or t
  misc_feature (2226)..(2226): n is a, c, g, or t
  misc_feature (2229)..(2229): n is a, c, g, or t
  misc_feature (2232)..(2232): n is a, c, g, or t
  misc_feature (2235)..(2235): n is a, c, g, or t
  misc_feature (2238)..(2238): n is a, c, g, or t
  misc_feature (2244)..(2244): n is a, c, g, or t
  misc_feature (2250)..(2250): n is a, c, g, or t
  misc_feature (2253)..(2253): n is a, c, g, or t
  misc_feature (2262)..(2262): n is a, c, g, or t
  misc_feature (2268)..(2268): n is a, c, g, or t
  misc_feature (2271)..(2271): n is a, c, g, or t
  misc_feature (2274)..(2274): n is a, c, g, or t
  misc_feature (2277)..(2277): n is a, c, g, or t
  misc_feature (2280)..(2280): n is a, c, g, or t
  misc_feature (2283)..(2283): n is a, c, g, or t
  misc_feature (2286)..(2286): n is a, c, g, or t
  misc_feature (2289)..(2289): n is a, c, g, or t
  misc_feature (2292)..(2292): n is a, c, g, or t
  misc_feature (2295)..(2295): n is a, c, g, or t
  misc_feature (2298)..(2298): n is a, c, g, or t
  misc_feature (2301)..(2301): n is a, c, g, or t
  misc_feature (2307)..(2307): n is a, c, g, or t
  misc_feature (2310)..(2310): n is a, c, g, or t
  misc_feature (2313)..(2313): n is a, c, g, or t
  misc_feature (2316)..(2316): n is a, c, g, or t
  misc_feature (2325)..(2325): n is a, c, g, or t
  misc_feature (2328)..(2328): n is a, c, g, or t
  misc_feature (2334)..(2334): n is a, c, g, or t
  misc_feature (2337)..(2337): n is a, c, g, or t
  misc_feature (2340)..(2340): n is a, c, g, or t
  misc_feature (2343)..(2343): n is a, c, g, or t
  misc_feature (2346)..(2346): n is a, c, g, or t
  misc_feature (2349)..(2349): n is a, c, g, or t
  misc_feature (2352)..(2352): n is a, c, g, or t
  misc_feature (2358)..(2358): n is a, c, g, or t
  misc_feature (2361)..(2361): n is a, c, g, or t
  misc_feature (2367)..(2367): n is a, c, g, or t
  misc_feature (2370)..(2370): n is a, c, g, or t
  misc_feature (2373)..(2373): n is a, c, g, or t
  misc_feature (2376)..(2376): n is a, c, g, or t
  misc_feature (2379)..(2379): n is a, c, g, or t
  misc_feature (2385)..(2385): n is a, c, g, or t
  misc_feature (2388)..(2388): n is a, c, g, or t
  misc_feature (2391)..(2391): n is a, c, g, or t
  misc_feature (2394)..(2394): n is a, c, g, or t
  misc_feature (2397)..(2397): n is a, c, g, or t
  misc_feature (2406)..(2406): n is a, c, g, or t
  misc_feature (2409)..(2409): n is a, c, g, or t
  misc_feature (2412)..(2412): n is a, c, g, or t
  misc_feature (2415)..(2415): n is a, c, g, or t
  misc_feature (2424)..(2424): n is a, c, g, or t
  misc_feature (2433)..(2433): n is a, c, g, or t
  misc_feature (2439)..(2439): n is a, c, g, or t
  misc_feature (2442)..(2442): n is a, c, g, or t
  misc_feature (2448)..(2448): n is a, c, g, or t
  misc_feature (2451)..(2451): n is a, c, g, or t
  misc_feature (2454)..(2454): n is a, c, g, or t
  misc_feature (2457)..(2457): n is a, c, g, or t
  misc_feature (2460)..(2460): n is a, c, g, or t
  misc_feature (2463)..(2463): n is a, c, g, or t
  misc_feature (2466)..(2466): n is a, c, g, or t
  misc_feature (2469)..(2469): n is a, c, g, or t
  misc_feature (2475)..(2475): n is a, c, g, or t
  misc_feature (2478)..(2478): n is a, c, g, or t
  misc_feature (2481)..(2481): n is a, c, g, or t
  misc_feature (2484)..(2484): n is a, c, g, or t
  misc_feature (2487)..(2487): n is a, c, g, or t
  misc_feature (2490)..(2490): n is a, c, g, or t
  misc_feature (2493)..(2493): n is a, c, g, or t
  misc_feature (2496)..(2496): n is a, c, g, or t
  misc_feature (2502)..(2502): n is a, c, g, or t
  misc_feature (2505)..(2505): n is a, c, g, or t
  misc_feature (2508)..(2508): n is a, c, g, or t
  misc_feature (2511)..(2511): n is a, c, g, or t
  misc_feature (2514)..(2514): n is a, c, g, or t
  misc_feature (2517)..(2517): n is a, c, g, or t
  misc_feature (2520)..(2520): n is a, c, g, or t
  misc_feature (2523)..(2523): n is a, c, g, or t
  misc_feature (2526)..(2526): n is a, c, g, or t
  misc_feature (2532)..(2532): n is a, c, g, or t
  misc_feature (2535)..(2535): n is a, c, g, or t
  misc_feature (2541)..(2541): n is a, c, g, or t
  misc_feature (2550)..(2550): n is a, c, g, or t
  misc_feature (2553)..(2553): n is a, c, g, or t
  misc_feature (2559)..(2559): n is a, c, g, or t
  misc_feature (2565)..(2565): n is a, c, g, or t
  misc_feature (2568)..(2568): n is a, c, g, or t
  misc_feature (2571)..(2571): n is a, c, g, or t
  misc_feature (2577)..(2577): n is a, c, g, or t
  misc_feature (2580)..(2580): n is a, c, g, or t
  misc_feature (2583)..(2583): n is a, c, g, or t
  misc_feature (2586)..(2586): n is a, c, g, or t
  misc_feature (2592)..(2592): n is a, c, g, or t
  misc_feature (2595)..(2595): n is a, c, g, or t
  misc_feature (2598)..(2598): n is a, c, g, or t
  misc_feature (2604)..(2604): n is a, c, g, or t
  misc_feature (2607)..(2607): n is a, c, g, or t
  misc_feature (2613)..(2613): n is a, c, g, or t
  misc_feature (2616)..(2616): n is a, c, g, or t
  misc_feature (2619)..(2619): n is a, c, g, or t
  misc_feature (2622)..(2622): n is a, c, g, or t
  misc_feature (2628)..(2628): n is a, c, g, or t
  misc_feature (2631)..(2631): n is a, c, g, or t
  misc_feature (2634)..(2634): n is a, c, g, or t
  misc_feature (2640)..(2640): n is a, c, g, or t
  misc_feature (2643)..(2643): n is a, c, g, or t
  misc_feature (2646)..(2646): n is a, c, g, or t
  misc_feature (2649)..(2649): n is a, c, g, or t
  misc_feature (2655)..(2655): n is a, c, g, or t
  misc_feature (2658)..(2658): n is a, c, g, or t
  misc_feature (2661)..(2661): n is a, c, g, or t
  misc_feature (2664)..(2664): n is a, c, g, or t
  misc_feature (2667)..(2667): n is a, c, g, or t
  misc_feature (2676)..(2676): n is a, c, g, or t
  misc_feature (2679)..(2679): n is a, c, g, or t
  misc_feature (2682)..(2682): n is a, c, g, or t
  misc_feature (2685)..(2685): n is a, c, g, or t
  misc_feature (2688)..(2688): n is a, c, g, or t
  misc_feature (2691)..(2691): n is a, c, g, or t
  misc_feature (2694)..(2694): n is a, c, g, or t
  misc_feature (2697)..(2697): n is a, c, g, or t
  misc_feature (2703)..(2703): n is a, c, g, or t
  misc_feature (2706)..(2706): n is a, c, g, or t
  misc_feature (2709)..(2709): n is a, c, g, or t
  misc_feature (2712)..(2712): n is a, c, g, or t
  misc_feature (2715)..(2715): n is a, c, g, or t
  misc_feature (2721)..(2721): n is a, c, g, or t
  misc_feature (2724)..(2724): n is a, c, g, or t
  misc_feature (2727)..(2727): n is a, c, g, or t
  misc_feature (2730)..(2730): n is a, c, g, or t
  misc_feature (2733)..(2733): n is a, c, g, or t
  misc_feature (2736)..(2736): n is a, c, g, or t
  misc_feature (2739)..(2739): n is a, c, g, or t
  misc_feature (2742)..(2742): n is a, c, g, or t
  misc_feature (2748)..(2748): n is a, c, g, or t
  misc_feature (2754)..(2754): n is a, c, g, or t
  misc_feature (2757)..(2757): n is a, c, g, or t
  misc_feature (2760)..(2760): n is a, c, g, or t
  misc_feature (2766)..(2766): n is a, c, g, or t
  misc_feature (2775)..(2775): n is a, c, g, or t
  misc_feature (2781)..(2781): n is a, c, g, or t
  misc_feature (2784)..(2784): n is a, c, g, or t
  misc_feature (2787)..(2787): n is a, c, g, or t
  misc_feature (2793)..(2793): n is a, c, g, or t
  misc_feature (2796)..(2796): n is a, c, g, or t
  misc_feature (2802)..(2802): n is a, c, g, or t
  misc_feature (2805)..(2805): n is a, c, g, or t
  misc_feature (2808)..(2808): n is a, c, g, or t
  misc_feature (2811)..(2811): n is a, c, g, or t
  misc_feature (2820)..(2820): n is a, c, g, or t
  misc_feature (2829)..(2829): n is a, c, g, or t
  misc_feature (2835)..(2835): n is a, c, g, or t
  misc_feature (2838)..(2838): n is a, c, g, or t
  misc_feature (2841)..(2841): n is a, c, g, or t
  misc_feature (2844)..(2844): n is a, c, g, or t
  misc_feature (2847)..(2847): n is a, c, g, or t
  misc_feature (2850)..(2850): n is a, c, g, or t
  misc_feature (2856)..(2856): n is a, c, g, or t
  misc_feature (2859)..(2859): n is a, c, g, or t
  misc_feature (2862)..(2862): n is a, c, g, or t
  misc_feature (2865)..(2865): n is a, c, g, or t
  misc_feature (2868)..(2868): n is a, c, g, or t
  misc_feature (2874)..(2874): n is a, c, g, or t
  misc_feature (2883)..(2883): n is a, c, g, or t
  misc_feature (2889)..(2889): n is a, c, g, or t
  misc_feature (2892)..(2892): n is a, c, g, or t
  misc_feature (2895)..(2895): n is a, c, g, or t
  misc_feature (2898)..(2898): n is a, c, g, or t
  misc_feature (2901)..(2901): n is a, c, g, or t
  misc_feature (2904)..(2904): n is a, c, g, or t
  misc_feature (2910)..(2910): n is a, c, g, or t
  misc_feature (2913)..(2913): n is a, c, g, or t
  misc_feature (2916)..(2916): n is a, c, g, or t
  misc_feature (2919)..(2919): n is a, c, g, or t
  misc_feature (2922)..(2922): n is a, c, g, or t
  misc_feature (2925)..(2925): n is a, c, g, or t
  misc_feature (2928)..(2928): n is a, c, g, or t
  misc_feature (2931)..(2931): n is a, c, g, or t
  misc_feature (2934)..(2934): n is a, c, g, or t
  misc_feature (2937)..(2937): n is a, c, g, or t
  misc_feature (2940)..(2940): n is a, c, g, or t
  misc_feature (2943)..(2943): n is a, c, g, or t
  misc_feature (2946)..(2946): n is a, c, g, or t
  misc_feature (2949)..(2949): n is a, c, g, or t
  misc_feature (2955)..(2955): n is a, c, g, or t
  misc_feature (2958)..(2958): n is a, c, g, or t
  misc_feature (2964)..(2964): n is a, c, g, or t
  misc_feature (2967)..(2967): n is a, c, g, or t
  misc_feature (2970)..(2970): n is a, c, g, or t
  misc_feature (2973)..(2973): n is a, c, g, or t
  misc_feature (2976)..(2976): n is a, c, g, or t
  misc_feature (2979)..(2979): n is a, c, g, or t
  misc_feature (2982)..(2982): n is a, c, g, or t
  misc_feature (2985)..(2985): n is a, c, g, or t
  misc_feature (2991)..(2991): n is a, c, g, or t
  misc_feature (2997)..(2997): n is a, c, g, or t
  misc_feature (3000)..(3000): n is a, c, g, or t
  misc_feature (3006)..(3006): n is a, c, g, or t
  misc_feature (3009)..(3009): n is a, c, g, or t
  misc_feature (3012)..(3012): n is a, c, g, or t
  misc_feature (3015)..(3015): n is a, c, g, or t
  misc_feature (3018)..(3018): n is a, c, g, or t
  misc_feature (3021)..(3021): n is a, c, g, or t
  misc_feature (3024)..(3024): n is a, c, g, or t
  misc_feature (3027)..(3027): n is a, c, g, or t
  misc_feature (3030)..(3030): n is a, c, g, or t
  misc_feature (3033)..(3033): n is a, c, g, or t
  misc_feature (3036)..(3036): n is a, c, g, or t
  misc_feature (3042)..(3042): n is a, c, g, or t
ggnccngcnggnccnatgggnytnacnggnmgnccnggnccngtnggnccnccnggnwsnggnggnytnaarggngarccnggngaygtnggnccncarggnccnmgnggngtncarggnccnccnggnccngcnggnaarccnggnmgnmgnggnmgngcnggnwsngayggngcnmgnggnatgccnggncaracnggnccnaarggngaymgnggnttygayggnytngcnggnytnccnggngaraarggncaymgnggngayccnggnccnwsnggnccnccnggnccnccnggngaygayggngarmgnggngaygayggngargtnggnccnmgnggnytnccnggngarccnggnccnmgnggnytnytnggnccnaarggnccnccnggnccnccnggnccnccnggngtnacnggnatggayggncarccnggnccnaarggnaaygtnggnccncarggngarccnggnccnccnggncarcarggnaayccnggngcncarggnytnccnggnccncarggngcnathggnccnccnggngaraarggnccnytnggnaarccnggnytnccnggnatgccnggngcngayggnccnccnggncayccnggnaargarggnccnccnggngaraarggnggncarggnccnccnggnccncarggnccnathggntayccnggnccnmgnggngtnaarggngcngayggnathmgnggnytnaarggnacnaarggngaraarggngargayggnttyccnggnttyaarggngayatgggnathaarggngaymgnggngarathggnccnccnggnccnmgnggngargayggnccngarggnccnaarggnmgnggnggnccnaayggngayccnggnccnytnggnccnccnggngaraarggnaarytnggngtnccnggnytnccnggntayccnggnmgncarggnccnaarggnwsnathggnttyccnggnttyccnggngcnaayggngaraarggnggnmgnggnacnccnggnaarccnggnccnmgnggncarmgnggnccnacnggnccnmgnggngarmgnggnccnmgnggnathacnggnaarccnggnccnaarggnaaywsnggnggngayggnccngcnggnccnccnggngarmgnggnccnaayggnccncarggnccnacnggnttyccnggnccnaarggnccnccnggnccnccnggnaargayggnytnccnggncayccnggncarmgnggngaracnggnttycarggnaaracnggnccnccnggnccnccnggngtngtnggnccncarggnccnacnggngaracnggnccnatgggngarmgnggncayccnggnccnccnggnccnccnggngarcarggnytnccnggnytngcnggnaargarggnacnaarggngayccnggnccngcnggnytnccnggnaargayggnccnccnggnytnmgnggnttyccnggngaymgnggnytnccnggnccngtnggngcnytnggnytnaarggnaaygarggnccnccnggnccnccnggnccngcnggnwsnccnggngarmgnggnccngcnggngcngcnggnccnathggnathccnggnmgnccnggnccncarggnccnccnggnccngcnggngaraarggngcnccnggngaraarggnccncarggnccngcnggnmgngayggnytncarggnccngtnggnytnccnggnccngcnggnccngtnggnccnccnggngargayggngayaarggngarathggngarccnggncaraarggnwsnaarggngayaarggngarcarggnccnccnggnccnacnggnccncarggnccnathggncarccnggnccnwsnggngcngayggngarccnggnccnmgnggncarcarggnytnttyggncaraarggngaygarggnccnmgnggnttyccnggnccnccnggnccngtnggnytncarggnytnccnggnccnccnggngaraarggngaracnggngaygtnggncaratgggnccnccnggnccnccnggnccnmgnggnccnwsnggngcnccnggngcngayggnccncarggnccnccnggnggnathggnaayccnggngcngtnggngaraarggngarccnggngargcnggngarccnggnytnccnggngarggnggnccnccnggnccnaarggngarmgnggngaraarggngarwsnggnccnwsnggngcngcnggnccnccnggnccnaarggnccnccnggngaygayggnccnaarggnwsnccnggnccngtnggnttyccnggngayccnggnccnccnggngarccnggnccngcnggncargayggnccnccnggngayaarggngaygayggngarccnggncaracnggnwsnccnggnccnacnggngarccnggnccnwsnggnccnccnggnaarmgnggnccnccnggnccngcnggnccngarggnmgncarggngaraarggngcnaarggngargcnggnytngarggnccnccnggnaaracnggnccnathggnccncarggngcnccnggnaarccnggnccngayggnytnmgnggnathccnggnccngtnggngarcarggnytnccnggnwsnccnggnccngayggnccnccnggnccnatgggnccnccnggnytnccnggnytnaarggngaywsnggnccnaarggngaraarggncayccnggnytnathggnytnathggnccnccnggngarcarggngaraarggngaymgnggnytnccnggnccncarggnwsnwsnggnccnaarggngarcarggnathacnggnccnwsnggnccnathggnccnccnggnccnccnggnytnccnggnccnccnggnccnaarggngcnaarggnwsnwsnggnccnacnggnccnaarggngargcnggncayccnggnccnccnggnccnccnggnccnccnggngargtn

SEQ ID NO: 1107 - DNA, 3051 bp, Artificial Sequence
  hCol-CNA12 (alpha2(V) THD)
  misc_feature (3)..(3): n is a, c, g, or t
  misc_feature (6)..(6): n is a, c, g, or t
  misc_feature (9)..(9): n is a, c, g, or t
  misc_feature (12)..(12): n is a, c, g, or t
  misc_feature (15)..(15): n is a, c, g, or t
  misc_feature (18)..(18): n is a, c, g, or t
  misc_feature (21)..(21): n is a, c, g, or t
  misc_feature (24)..(24): n is a, c, g, or t
  misc_feature (27)..(27): n is a, c, g, or t
  misc_feature (30)..(30): n is a, c, g, or t
  misc_feature (33)..(33): n is a, c, g, or t
  misc_feature (39)..(39): n is a, c, g, or t
  misc_feature (42)..(42): n is a, c, g, or t
  misc_feature (48)..(48): n is a, c, g, or t
  misc_feature (57)..(57): n is a, c, g, or t
  misc_feature (60)..(60): n is a, c, g, or t
  misc_feature (63)..(63): n is a, c, g, or t
  misc_feature (66)..(66): n is a, c, g, or t
  misc_feature (69)..(69): n is a, c, g, or t
  misc_feature (72)..(72): n is a, c, g, or t
  misc_feature (75)..(75): n is a, c, g, or t
  misc_feature (78)..(78): n is a, c, g, or t
  misc_feature (81)..(81): n is a, c, g, or t
  misc_feature (84)..(84): n is a, c, g, or t
  misc_feature (90)..(90): n is a, c, g, or t
  misc_feature (93)..(93): n is a, c, g, or t
  misc_feature (99)..(99): n is a, c, g, or t
  misc_feature (102)..(102): n is a, c, g, or t
  misc_feature (105)..(105): n is a, c, g, or t
  misc_feature (111)..(111): n is a, c, g, or t
  misc_feature (114)..(114): n is a, c, g, or t
  misc_feature (120)..(120): n is a, c, g, or t
  misc_feature (123)..(123): n is a, c, g, or t
  misc_feature (126)..(126): n is a, c, g, or t
  misc_feature (129)..(129): n is a, c, g, or t
  misc_feature (132)..(132): n is a, c, g, or t
  misc_feature (138)..(138): n is a, c, g, or t
  misc_feature (141)..(141): n is a, c, g, or t
  misc_feature (144)..(144): n is a, c, g, or t
  misc_feature (147)..(147): n is a, c, g, or t
  misc_feature (153)..(153): n is a, c, g, or t
  misc_feature (156)..(156): n is a, c, g, or t
  misc_feature (165)..(165): n is a, c, g, or t
  misc_feature (171)..(171): n is a, c, g, or t
  misc_feature (174)..(174): n is a, c, g, or t
  misc_feature (177)..(177): n is a, c, g, or t
  misc_feature (183)..(183): n is a, c, g, or t
  misc_feature (189)..(189): n is a, c, g, or t
  misc_feature (192)..(192): n is a, c, g, or t
  misc_feature (198)..(198): n is a, c, g, or t
  misc_feature (201)..(201): n is a, c, g, or t
  misc_feature (207)..(207): n is a, c, g, or t
  misc_feature (210)..(210): n is a, c, g, or t
  misc_feature (213)..(213): n is a, c, g, or t
  misc_feature (216)..(216): n is a, c, g, or t
  misc_feature (219)..(219): n is a, c, g, or t
  misc_feature (222)..(222): n is a, c, g, or t
  misc_feature (225)..(225): n is a, c, g, or t
  misc_feature (228)..(228): n is a, c, g, or t
  misc_feature (234)..(234): n is a, c, g, or t
  misc_feature (237)..(237): n is a, c, g, or t
  misc_feature (240)..(240): n is a, c, g, or t
  misc_feature (243)..(243): n is a, c, g, or t
  misc_feature (246)..(246): n is a, c, g, or t
  misc_feature (249)..(249): n is a, c, g, or t
  misc_feature (252)..(252): n is a, c, g, or t
  misc_feature (255)..(255): n is a, c, g, or t
  misc_feature (258)..(258): n is a, c, g, or t
  misc_feature (264)..(264): n is a, c, g, or t
  misc_feature (270)..(270): n is a, c, g, or t
  misc_feature (273)..(273): n is a, c, g, or t
  misc_feature (282)..(282): n is a, c, g, or t
  misc_feature (285)..(285): n is a, c, g, or t
  misc_feature (291)..(291): n is a, c, g, or t
  misc_feature (294)..(294): n is a, c, g, or t
  misc_feature (300)..(300): n is a, c, g, or t
  misc_feature (306)..(306): n is a, c, g, or t
  misc_feature (309)..(309): n is a, c, g, or t
  misc_feature (312)..(312): n is a, c, g, or t
  misc_feature (315)..(315): n is a, c, g, or t
  misc_feature (318)..(318): n is a, c, g, or t
  misc_feature (321)..(321): n is a, c, g, or t
  misc_feature (327)..(327): n is a, c, g, or t
  misc_feature (333)..(333): n is a, c, g, or t
  misc_feature (336)..(336): n is a, c, g, or t
  misc_feature (339)..(339): n is a, c, g, or t
  misc_feature (342)..(342): n is a, c, g, or t
  misc_feature (345)..(345): n is a, c, g, or t
  misc_feature (348)..(348): n is a, c, g, or t
  misc_feature (354)..(354): n is a, c, g, or t
  misc_feature (357)..(357): n is a, c, g, or t
  misc_feature (363)..(363): n is a, c, g, or t
  misc_feature (366)..(366): n is a, c, g, or t
  misc_feature (369)..(369): n is a, c, g, or t
  misc_feature (372)..(372): n is a, c, g, or t
  misc_feature (375)..(375): n is a, c, g, or t
  misc_feature (378)..(378): n is a, c, g, or t
  misc_feature (381)..(381): n is a, c, g, or t
  misc_feature (387)..(387): n is a, c, g, or t
  misc_feature (390)..(390): n is a, c, g, or t
  misc_feature (396)..(396): n is a, c, g, or t
  misc_feature (399)..(399): n is a, c, g, or t
  misc_feature (402)..(402): n is a, c, g, or t
  misc_feature (405)..(405): n is a, c, g, or t
  misc_feature (408)..(408): n is a, c, g, or t
  misc_feature (411)..(411): n is a, c, g, or t
  misc_feature (417)..(417): n is a, c, g, or t
  misc_feature (420)..(420): n is a, c, g, or t
  misc_feature (423)..(423): n is a, c, g, or t
  misc_feature (426)..(426): n is a, c, g, or t
  misc_feature (432)..(432): n is a, c, g, or t
  misc_feature (435)..(435): n is a, c, g, or t
  misc_feature (438)..(438): n is a, c, g, or t
  misc_feature (444)..(444): n is a, c, g, or t
  misc_feature (450)..(450): n is a, c, g, or t
  misc_feature (453)..(453): n is a, c, g, or t
  misc_feature (459)..(459): n is a, c, g, or t
  misc_feature (462)..(462): n is a, c, g, or t
  misc_feature (465)..(465): n is a, c, g, or t
  misc_feature (471)..(471): n is a, c, g, or t
  misc_feature (474)..(474): n is a, c, g, or t
  misc_feature (477)..(477): n is a, c, g, or t
  misc_feature (480)..(480): n is a, c, g, or t
  misc_feature (486)..(486): n is a, c, g, or t
  misc_feature (489)..(489): n is a, c, g, or t
  misc_feature (492)..(492): n is a, c, g, or t
  misc_feature (495)..(495): n is a, c, g, or t
  misc_feature (498)..(498): n is a, c, g, or t
  misc_feature (504)..(504): n is a, c, g, or t
  misc_feature (507)..(507): n is a, c, g, or t
  misc_feature (513)..(513): n is a, c, g, or t
  misc_feature (516)..(516): n is a, c, g, or t
  misc_feature (525)..(525): n is a, c, g, or t
  misc_feature (531)..(531): n is a, c, g, or t
  misc_feature (534)..(534): n is a, c, g, or t
  misc_feature (537)..(537): n is a, c, g, or t
  misc_feature (540)..(540): n is a, c, g, or t
  misc_feature (543)..(543): n is a, c, g, or t
  misc_feature (546)..(546): n is a, c, g, or t
  misc_feature (549)..(549): n is a, c, g, or t
  misc_feature (552)..(552): n is a, c, g, or t
  misc_feature (555)..(555): n is a, c, g, or t
  misc_feature (561)..(561): n is a, c, g, or t
  misc_feature (564)..(564): n is a, c, g, or t
  misc_feature (570)..(570): n is a, c, g, or t
  misc_feature (576)..(576): n is a, c, g, or t
  misc_feature (579)..(579): n is a, c, g, or t
  misc_feature (585)..(585): n is a, c, g, or t
  misc_feature (588)..(588): n is a, c, g, or t
  misc_feature (591)..(591): n is a, c, g, or t
  misc_feature (594)..(594): n is a, c, g, or t
  misc_feature (597)..(597): n is a, c, g, or t
  misc_feature (600)..(600): n is a, c, g, or t
  misc_feature (603)..(603): n is a, c, g, or t
  misc_feature (606)..(606): n is a, c, g, or t
  misc_feature (609)..(609): n is a, c, g, or t
  misc_feature (612)..(612): n is a, c, g, or t
  misc_feature (615)..(615): n is a, c, g, or t
  misc_feature (618)..(618): n is a, c, g, or t
  misc_feature (621)..(621): n is a, c, g, or t
  misc_feature (624)..(624): n is a, c, g, or t
  misc_feature (627)..(627): n is a, c, g, or t
  misc_feature (633)..(633): n is a, c, g, or t
  misc_feature (636)..(636): n is a, c, g, or t
  misc_feature (642)..(642): n is a, c, g, or t
  misc_feature (645)..(645): n is a, c, g, or t
  misc_feature (648)..(648): n is a, c, g, or t
  misc_feature (651)..(651): n is a, c, g, or t
  misc_feature (654)..(654): n is a, c, g, or t
  misc_feature (660)..(660): n is a, c, g, or t
  misc_feature (663)..(663): n is a, c, g, or t
  misc_feature (666)..(666): n is a, c, g, or t
  misc_feature (669)..(669): n is a, c, g, or t
  misc_feature (672)..(672): n is a, c, g, or t
  misc_feature (675)..(675): n is a, c, g, or t
  misc_feature (678)..(678): n is a, c, g, or t
  misc_feature (681)..(681): n is a, c, g, or t
  misc_feature (684)..(684): n is a, c, g, or t
  misc_feature (687)..(687): n is a, c, g, or t
  misc_feature (690)..(690): n is a, c, g, or t
  misc_feature (693)..(693): n is a, c, g, or t
  misc_feature (696)..(696): n is a, c, g, or t
  misc_feature (699)..(699): n is a, c, g, or t
  misc_feature (702)..(702): n is a, c, g, or t
  misc_feature (705)..(705): n is a, c, g, or t
  misc_feature (708)..(708): n is a, c, g, or t
  misc_feature (711)..(711): n is a, c, g, or t
  misc_feature (714)..(714): n is a, c, g, or t
  misc_feature (717)..(717): n is a, c, g, or t
  misc_feature (720)..(720): n is a, c, g, or t
  misc_feature (723)..(723): n is a, c, g, or t
  misc_feature (726)..(726): n is a, c, g, or t
  misc_feature (732)..(732): n is a, c, g, or t
  misc_feature (735)..(735): n is a, c, g, or t
  misc_feature (738)..(738): n is a, c, g, or t
  misc_feature (741)..(741): n is a, c, g, or t
  misc_feature (744)..(744): n is a, c, g, or t
  misc_feature (750)..(750): n is a, c, g, or t
  misc_feature (756)..(756): n is a, c, g, or t
  misc_feature (759)..(759): n is a, c, g, or t
  misc_feature (765)..(765): n is a, c, g, or t
  misc_feature (768)..(768): n is a, c, g, or t
  misc_feature (774)..(774): n is a, c, g, or t
  misc_feature (777)..(777): n is a, c, g, or t
  misc_feature (780)..(780): n is a, c, g, or t
  misc_feature (783)..(783): n is a, c, g, or t
  misc_feature (786)..(786): n is a, c, g, or t
  misc_feature (795)..(795): n is a, c, g, or t
  misc_feature (801)..(801): n is a, c, g, or t
  misc_feature (804)..(804): n is a, c, g, or t
  misc_feature (807)..(807): n is a, c, g, or t
  misc_feature (813)..(813): n is a, c, g, or t
  misc_feature (819)..(819): n is a, c, g, or t
  misc_feature (822)..(822): n is a, c, g, or t
  misc_feature (825)..(825): n is a, c, g, or t
  misc_feature (831)..(831): n is a, c, g, or t
  misc_feature (840)..(840): n is a, c, g, or t
  misc_feature (843)..(843): n is a, c, g, or t
  misc_feature (849)..(849): n is a, c, g, or t
  misc_feature (852)..(852): n is a, c, g, or t
  misc_feature (855)..(855): n is a, c, g, or t
  misc_feature (858)..(858): n is a, c, g, or t
  misc_feature (867)..(867): n is a, c, g, or t
  misc_feature (873)..(873): n is a, c, g, or t
  misc_feature (876)..(876): n is a, c, g, or t
  misc_feature (879)..(879): n is a, c, g, or t
  misc_feature (882)..(882): n is a, c, g, or t
  misc_feature (885)..(885): n is a, c, g, or t
  misc_feature (891)..(891): n is a, c, g, or t
  misc_feature (894)..(894): n is a, c, g, or t
  misc_feature (897)..(897): n is a, c, g, or t
  misc_feature (900)..(900): n is a, c, g, or t
  misc_feature (903)..(903): n is a, c, g, or t
  misc_feature (906)..(906): n is a, c, g, or t
  misc_feature (909)..(909): n is a, c, g, or t
  misc_feature (912)..(912): n is a, c, g, or t
  misc_feature (915)..(915): n is a, c, g, or t
  misc_feature (918)..(918): n is a, c, g, or t
  misc_feature (921)..(921): n is a, c, g, or t
  misc_feature (927)..(927): n is a, c, g, or t
  misc_feature (930)..(930): n is a, c, g, or t
  misc_feature (933)..(933): n is a, c, g, or t
  misc_feature (936)..(936): n is a, c, g, or t
  misc_feature (939)..(939): n is a, c, g, or t
  misc_feature (945)..(945): n is a, c, g, or t
  misc_feature (948)..(948): n is a, c, g, or t
  misc_feature (954)..(954): n is a, c, g, or t
  misc_feature (957)..(957): n is a, c, g, or t
  misc_feature (960)..(960): n is a, c, g, or t
  misc_feature (966)..(966): n is a, c, g, or t
  misc_feature (969)..(969): n is a, c, g, or t
  misc_feature (972)..(972): n is a, c, g, or t
  misc_feature (975)..(975): n is a, c, g, or t
  misc_feature (978)..(978): n is a, c, g, or t
  misc_feature (984)..(984): n is a, c, g, or t
  misc_feature (987)..(987): n is a, c, g, or t
  misc_feature (993)..(993): n is a, c, g, or t
  misc_feature (999)..(999): n is a, c, g, or t
  misc_feature (1002)..(1002): n is a, c, g, or t
  misc_feature (1005)..(1005): n is a, c, g, or t
  misc_feature (1008)..(1008): n is a, c, g, or t
  misc_feature (1011)..(1011): n is a, c, g, or t
  misc_feature (1014)..(1014): n is a, c, g, or t
  misc_feature (1017)..(1017): n is a, c, g, or t
  misc_feature (1020)..(1020): n is a, c, g, or t
  misc_feature (1023)..(1023): n is a, c, g, or t
  misc_feature (1029)..(1029): n is a, c, g, or t
  misc_feature (1032)..(1032): n is a, c, g, or t
  misc_feature (1038)..(1038): n is a, c, g, or t
  misc_feature (1044)..(1044): n is a, c, g, or t
  misc_feature (1047)..(1047): n is a, c, g, or t
  misc_feature (1050)..(1050): n is a, c, g, or t
  misc_feature (1053)..(1053): n is a, c, g, or t
  misc_feature (1056)..(1056): n is a, c, g, or t
  misc_feature (1062)..(1062): n is a, c, g, or t
  misc_feature (1065)..(1065): n is a, c, g, or t
  misc_feature (1068)..(1068): n is a, c, g, or t
  misc_feature (1071)..(1071): n is a, c, g, or t
  misc_feature (1074)..(1074): n is a, c, g, or t
  misc_feature (1077)..(1077): n is a, c, g, or t
  misc_feature (1080)..(1080): n is a, c, g, or t
  misc_feature (1083)..(1083): n is a, c, g, or t
  misc_feature (1086)..(1086): n is a, c, g, or t
  misc_feature (1089)..(1089): n is a, c, g, or t
  misc_feature (1092)..(1092): n is a, c, g, or t
  misc_feature (1098)..(1098): n is a, c, g, or t
  misc_feature (1101)..(1101): n is a, c, g, or t
  misc_feature (1104)..(1104): n is a, c, g, or t
  misc_feature (1110)..(1110): n is a, c, g, or t
  misc_feature (1113)..(1113): n is a, c, g, or t
  misc_feature (1119)..(1119): n is a, c, g, or t
  misc_feature (1125)..(1125): n is a, c, g, or t
  misc_feature (1128)..(1128): n is a, c, g, or t
  misc_feature (1131)..(1131): n is a, c, g, or t
  misc_feature (1134)..(1134): n is a, c, g, or t
  misc_feature (1137)..(1137): n is a, c, g, or t
  misc_feature (1140)..(1140): n is a, c, g, or t
  misc_feature (1143)..(1143): n is a, c, g, or t
  misc_feature (1146)..(1146): n is a, c, g, or t
  misc_feature (1155)..(1155): n is a, c, g, or t
  misc_feature (1158)..(1158): n is a, c, g, or t
  misc_feature (1161)..(1161): n is a, c, g, or t
  misc_feature (1164)..(1164): n is a, c, g, or t
  misc_feature (1167)..(1167): n is a, c, g, or t
  misc_feature (1170)..(1170): n is a, c, g, or t
  misc_feature (1173)..(1173): n is a, c, g, or t
  misc_feature (1176)..(1176): n is a, c, g, or t
  misc_feature (1182)..(1182): n is a, c, g, or t
  misc_feature (1188)..(1188): n is a, c, g, or t
  misc_feature (1191)..(1191): n is a, c, g, or t
  misc_feature (1197)..(1197): n is a, c, g, or t
  misc_feature (1200)..(1200): n is a, c, g, or t
  misc_feature (1203)..(1203): n is a, c, g, or t
  misc_feature (1209)..(1209): n is a, c, g, or t
  misc_feature (1212)..(1212): n is a, c, g, or t
  misc_feature (1215)..(1215): n is a, c, g, or t
  misc_feature (1218)..(1218): n is a, c, g, or t
  misc_feature (1221)..(1221): n is a, c, g, or t
  misc_feature (1227)..(1227): n is a, c, g, or t
  misc_feature (1230)..(1230): n is a, c, g, or t
  misc_feature (1233)..(1233): n is a, c, g, or t
  misc_feature (1236)..(1236): n is a, c, g, or t
  misc_feature (1242)..(1242): n is a, c, g, or t
  misc_feature (1245)..(1245): n is a, c, g, or t
  misc_feature (1251)..(1251): n is a, c, g, or t
  misc_feature (1254)..(1254): n is a, c, g, or t
  misc_feature (1260)..(1260): n is a, c, g, or t
  misc_feature (1263)..(1263): n is a, c, g, or t
  misc_feature (1269)..(1269): n is a, c, g, or t
  misc_feature (1272)..(1272): n is a, c, g, or t
  misc_feature (1275)..(1275): n is a, c, g, or t
  misc_feature (1278)..(1278): n is a, c, g, or t
  misc_feature (1281)..(1281): n is a, c, g, or t
  misc_feature (1287)..(1287): n is a, c, g, or t
  misc_feature (1290)..(1290): n is a, c, g, or t
  misc_feature (1293)..(1293): n is a, c, g, or t
  misc_feature (1296)..(1296): n is a, c, g, or t
  misc_feature (1299)..(1299): n is a, c, g, or t
  misc_feature (1308)..(1308): n is a, c, g, or t
  misc_feature (1314)..(1314): n is a, c, g, or t
  misc_feature (1317)..(1317): n is a, c, g, or t
  misc_feature (1320)..(1320): n is a, c, g, or t
  misc_feature (1323)..(1323): n is a, c, g, or t
  misc_feature (1326)..(1326): n is a, c, g, or t
  misc_feature (1329)..(1329): n is a, c, g, or t
  misc_feature (1332)..(1332): n is a, c, g, or t
  misc_feature (1335)..(1335): n is a, c, g, or t
  misc_feature (1338)..(1338): n is a, c, g, or t
  misc_feature (1341)..(1341): n is a, c, g, or t
  misc_feature (1344)..(1344): n is a, c, g, or t
  misc_feature (1347)..(1347): n is a, c, g, or t
  misc_feature (1350)..(1350): n is a, c, g, or t
  misc_feature (1353)..(1353): n is a, c, g, or t
  misc_feature (1359)..(1359): n is a, c, g, or t
  misc_feature (1362)..(1362): n is a, c, g, or t
  misc_feature (1371)..(1371): n is a, c, g, or t
  misc_feature (1374)..(1374): n is a, c, g, or t
  misc_feature (1377)..(1377): n is a, c, g, or t
  misc_feature (1380)..(1380): n is a, c, g, or t
  misc_feature (1383)..(1383): n is a, c, g, or t
  misc_feature (1386)..(1386): n is a, c, g, or t
  misc_feature (1389)..(1389): n is a, c, g, or t
  misc_feature (1398)..(1398): n is a, c, g, or t
  misc_feature (1401)..(1401): n is a, c, g, or t
  misc_feature (1404)..(1404): n is a, c, g, or t
  misc_feature (1407)..(1407): n is a, c, g, or t
  misc_feature (1410)..(1410): n is a, c, g, or t
  misc_feature (1413)..(1413): n is a, c, g, or t
  misc_feature (1416)..(1416): n is a, c, g, or t
  misc_feature (1419)..(1419): n is a, c, g, or t
  misc_feature (1422)..(1422): n is a, c, g, or t
  misc_feature (1425)..(1425): n is a, c, g, or t
  misc_feature (1431)..(1431): n is a, c, g, or t
  misc_feature (1434)..(1434): n is a, c, g, or t
  misc_feature (1440)..(1440): n is a, c, g, or t
  misc_feature (1443)..(1443): n is a, c, g, or t
  misc_feature (1452)..(1452): n is a, c, g, or t
  misc_feature (1455)..(1455): n is a, c, g, or t
  misc_feature (1458)..(1458): n is a, c, g, or t
  misc_feature (1461)..(1461): n is a, c, g, or t
  misc_feature (1467)..(1467): n is a, c, g, or t
  misc_feature (1470)..(1470): n is a, c, g, or t
  misc_feature (1473)..(1473): n is a, c, g, or t
  misc_feature (1476)..(1476): n is a, c, g, or t
  misc_feature (1479)..(1479): n is a, c, g, or t
  misc_feature (1482)..(1482): n is a, c, g, or t
  misc_feature (1485)..(1485): n is a, c, g, or t
  misc_feature (1488)..(1488): n is a, c, g, or t
  misc_feature (1491)..(1491): n is a, c, g, or t
  misc_feature (1494)..(1494): n is a, c, g, or t
  misc_feature (1497)..(1497): n is a, c, g, or t
  misc_feature (1503)..(1503): n is a, c, g, or t
  misc_feature (1506)..(1506): n is a, c, g, or t
  misc_feature (1512)..(1512): n is a, c, g, or t
  misc_feature (1515)..(1515): n is a, c, g, or t
  misc_feature (1521)..(1521): n is a, c, g, or t
  misc_feature (1524)..(1524): n is a, c, g, or t
  misc_feature (1530)..(1530): n is a, c, g, or t
  misc_feature (1533)..(1533): n is a, c, g, or t
  misc_feature (1539)..(1539): n is a, c, g, or t
  misc_feature (1542)..(1542): n is a, c, g, or t
  misc_feature (1545)..(1545): n is a, c, g, or t
  misc_feature (1548)..(1548): n is a, c, g, or t
  misc_feature (1551)..(1551): n is a, c, g, or t
  misc_feature (1560)..(1560): n is a, c, g, or t
  misc_feature (1566)..(1566): n is a, c, g, or t
  misc_feature (1569)..(1569): n is a, c, g, or t
  misc_feature (1572)..(1572): n is a, c, g, or t
  misc_feature (1578)..(1578): n is a, c, g, or t
  misc_feature (1581)..(1581): n is a, c, g, or t
  misc_feature (1587)..(1587): n is a, c, g, or t
  misc_feature (1590)..(1590): n is a, c, g, or t
  misc_feature (1596)..(1596): n is a, c, g, or t
  misc_feature (1599)..(1599): n is a, c, g, or t
  misc_feature (1602)..(1602): n is a, c, g, or t
  misc_feature (1605)..(1605): n is a, c, g, or t
  misc_feature (1608)..(1608): n is a, c, g, or t
  misc_feature (1611)..(1611): n is a, c, g, or t
  misc_feature (1614)..(1614): n is a, c, g, or t
  misc_feature (1617)..(1617): n is a, c, g, or t
  misc_feature (1620)..(1620): n is a, c, g, or t
  misc_feature (1623)..(1623): n is a, c, g, or t
  misc_feature (1629)..(1629): n is a, c, g, or t
  misc_feature (1632)..(1632): n is a, c, g, or t
  misc_feature (1635)..(1635): n is a, c, g, or t
  misc_feature (1638)..(1638): n is a, c, g, or t
  misc_feature (1641)..(1641): n is a, c, g, or t
  misc_feature (1644)..(1644): n is a, c, g, or t
  misc_feature (1650)..(1650): n is a, c, g, or t
  misc_feature (1656)..(1656): n is a, c, g, or t
  misc_feature (1659)..(1659): n is a, c, g, or t
  misc_feature (1665)..(1665): n is a, c, g, or t
  misc_feature (1668)..(1668): n is a, c, g, or t
  misc_feature (1674)..(1674): n is a, c, g, or t
  misc_feature (1677)..(1677): n is a, c, g, or t
  misc_feature (1680)..(1680): n is a, c, g, or t
  misc_feature (1683)..(1683): n is a, c, g, or t
  misc_feature (1686)..(1686): n is a, c, g, or t
  misc_feature (1689)..(1689): n is a, c, g, or t
  misc_feature (1695)..(1695): n is a, c, g, or t
  misc_feature (1701)..(1701): n is a, c, g, or t
  misc_feature (1704)..(1704): n is a, c, g, or t
  misc_feature (1707)..(1707): n is a, c, g, or t
  misc_feature (1713)..(1713): n is a, c, g, or t
  misc_feature (1722)..(1722): n is a, c, g, or t
  misc_feature (1725)..(1725): n is a, c, g, or t
  misc_feature (1731)..(1731): n is a, c, g, or t
  misc_feature (1734)..(1734): n is a, c, g, or t
  misc_feature (1737)..(1737): n is a, c, g, or t
  misc_feature (1740)..(1740): n is a, c, g, or t
  misc_feature (1749)..(1749): n is a, c, g, or t
  misc_feature (1752)..(1752): n is a, c, g, or t
  misc_feature (1755)..(1755): n is a, c, g, or t
  misc_feature (1758)..(1758): n is a, c, g, or t
  misc_feature (1761)..(1761): n is a, c, g, or t
  misc_feature (1764)..(1764): n is a, c, g, or t
  misc_feature (1767)..(1767): n is a, c, g, or t
  misc_feature (1770)..(1770): n is a, c, g, or t
  misc_feature (1773)..(1773): n is a, c, g, or t
  misc_feature (1776)..(1776): n is a, c, g, or t
  misc_feature (1779)..(1779): n is a, c, g, or t
  misc_feature (1782)..(1782): n is a, c, g, or t
  misc_feature (1785)..(1785): n is a, c, g, or t
  misc_feature (1788)..(1788): n is a, c, g, or t
  misc_feature (1791)..(1791): n is a, c, g, or t
  misc_feature (1794)..(1794): n is a, c, g, or t
  misc_feature (1797)..(1797): n is a, c, g, or t
  misc_feature (1800)..(1800): n is a, c, g, or t
  misc_feature (1803)..(1803): n is a, c, g, or t
  misc_feature (1812)..(1812): n is a, c, g, or t
  misc_feature (1818)..(1818): n is a, c, g, or t
  misc_feature (1821)..(1821): n is a, c, g, or t
  misc_feature (1824)..(1824): n is a, c, g, or t
  misc_feature (1827)..(1827): n is a, c, g, or t
  misc_feature (1830)..(1830): n is a, c, g, or t
  misc_feature (1833)..(1833): n is a, c, g, or t
  misc_feature (1836)..(1836): n is a, c, g, or t
  misc_feature (1839)..(1839): n is a, c, g, or t
  misc_feature (1842)..(1842): n is a, c, g, or t
  misc_feature (1845)..(1845): n is a, c, g, or t
  misc_feature (1848)..(1848): n is a, c, g, or t
  misc_feature (1851)..(1851): n is a, c, g, or t
  misc_feature (1854)..(1854): n is a, c, g, or t
  misc_feature (1857)..(1857): n is a, c, g, or t
  misc_feature (1863)..(1863): n is a, c, g, or t
  misc_feature (1866)..(1866): n is a, c, g, or t
  misc_feature (1869)..(1869): n is a, c, g, or t
  misc_feature (1872)..(1872): n is a, c, g, or t
  misc_feature (1875)..(1875): n is a, c, g, or t
  misc_feature (1884)..(1884): n is a, c, g, or t
  misc_feature (1887)..(1887): n is a, c, g, or t
  misc_feature (1890)..(1890): n is a, c, g, or t
  misc_feature (1893)..(1893): n is a, c, g, or t
  misc_feature (1896)..(1896): n is a, c, g, or t
  misc_feature (1899)..(1899): n is a, c, g, or t
  misc_feature (1902)..(1902): n is a, c, g, or t
  misc_feature (1908)..(1908): n is a, c, g, or t
  misc_feature (1911)..(1911): n is a, c, g, or t
  misc_feature (1914)..(1914): n is a, c, g, or t
  misc_feature (1920)..(1920): n is a, c, g, or t
  misc_feature (1923)..(1923): n is a, c, g, or t
  misc_feature (1929)..(1929): n is a, c, g, or t
  misc_feature (1935)..(1935): n is a, c, g, or t
  misc_feature (1938)..(1938): n is a, c, g, or t
  misc_feature (1941)..(1941): n is a, c, g, or t
  misc_feature (1947)..(1947): n is a, c, g, or t
  misc_feature (1953)..(1953): n is a, c, g, or t
  misc_feature (1956)..(1956): n is a, c, g, or t
  misc_feature (1962)..(1962): n is a, c, g, or t
  misc_feature (1965)..(1965): n is a, c, g, or t
  misc_feature (1974)..(1974): n is a, c, g, or t
  misc_feature (1980)..(1980): n is a, c, g, or t
  misc_feature (1983)..(1983): n is a, c, g, or t
  misc_feature (1986)..(1986): n is a, c, g, or t
  misc_feature (1989)..(1989): n is a, c, g, or t
  misc_feature (1992)..(1992): n is a, c, g, or t
  misc_feature (1995)..(1995): n is a, c, g, or t
  misc_feature (2001)..(2001): n is a, c, g, or t
  misc_feature (2004)..(2004): n is a, c, g, or t
  misc_feature (2007)..(2007): n is a, c, g, or t
  misc_feature (2010)..(2010): n is a, c, g, or t
  misc_feature (2013)..(2013): n is a, c, g, or t
  misc_feature (2016)..(2016): n is a, c, g, or t
  misc_feature (2019)..(2019): n is a, c, g, or t
  misc_feature (2022)..(2022): n is a, c, g, or t
  misc_feature (2028)..(2028): n is a, c, g, or t
  misc_feature (2031)..(2031): n is a, c, g, or t
  misc_feature (2037)..(2037): n is a, c, g, or t
  misc_feature (2040)..(2040): n is a, c, g, or t
  misc_feature (2043)..(2043): n is a, c, g, or t
  misc_feature (2046)..(2046): n is a, c, g, or t
  misc_feature (2049)..(2049): n is a, c, g, or t
  misc_feature (2055)..(2055): n is a, c, g, or t
  misc_feature (2058)..(2058): n is a, c, g, or t
  misc_feature (2061)..(2061): n is a, c, g, or t
  misc_feature (2064)..(2064): n is a, c, g, or t
  misc_feature (2067)..(2067): n is a, c, g, or t
  misc_feature (2073)..(2073): n is a, c, g, or t
  misc_feature (2076)..(2076): n is a, c, g, or t
  misc_feature (2079)..(2079): n is a, c, g, or t
  misc_feature (2082)..(2082): n is a, c, g, or t
  misc_feature (2085)..(2085): n is a, c, g, or t
  misc_feature (2088)..(2088): n is a, c, g, or t
  misc_feature (2091)..(2091): n is a, c, g, or t
  misc_feature (2097)..(2097): n is a, c, g, or t
  misc_feature (2100)..(2100): n is a, c, g, or t
  misc_feature (2103)..(2103): n is a, c, g, or t
  misc_feature (2106)..(2106): n is a, c, g, or t
  misc_feature (2109)..(2109): n is a, c, g, or t
  misc_feature (2112)..(2112): n is a, c, g, or t
  misc_feature (2115)..(2115): n is a, c, g, or t
  misc_feature (2118)..(2118): n is a, c, g, or t
  misc_feature (2121)..(2121): n is a, c, g, or t
  misc_feature (2124)..(2124): n is a, c, g, or t
  misc_feature (2127)..(2127): n is a, c, g, or t
  misc_feature (2130)..(2130): n is a, c, g, or t
  misc_feature (2133)..(2133): n is a, c, g, or t
  misc_feature (2136)..(2136): n is a, c, g, or t
  misc_feature (2139)..(2139): n is a, c, g, or t
  misc_feature (2142)..(2142): n is a, c, g, or t
  misc_feature (2145)..(2145): n is a, c, g, or t
  misc_feature (2148)..(2148): n is a, c, g, or t
  misc_feature (2151)..(2151): n is a, c, g, or t
  misc_feature (2154)..(2154): n is a, c, g, or t
  misc_feature (2157)..(2157): n is a, c, g, or t
  misc_feature (2160)..(2160): n is a, c, g, or t
  misc_feature (2163)..(2163): n is a, c, g, or t
  misc_feature (2169)..(2169): n is a, c, g, or t
  misc_feature (2172)..(2172): n is a, c, g, or t
  misc_feature (2181)..(2181): n is a, c, g, or t
  misc_feature (2184)..(2184): n is a, c, g, or t
  misc_feature (2187)..(2187): n is a, c, g, or t
  misc_feature (2190)..(2190): n is a, c, g, or t
  misc_feature (2193)..(2193): n is a, c, g, or t
  misc_feature (2196)..(2196): n is a, c, g, or t
  misc_feature (2199)..(2199): n is a, c, g, or t
  misc_feature (2205)..(2205): n is a, c, g, or t
  misc_feature (2208)..(2208): n is a, c, g, or t
  misc_feature (2211)..(2211): n is a, c, g, or t
  misc_feature (2217)..(2217): n is a, c, g, or t
  misc_feature (2220)..(2220): n is a, c, g, or t
  misc_feature (2223)..(2223): n is a, c, g, or t
  misc_feature (2226)..(2226): n is a, c, g, or t
  misc_feature (2232)..(2232): n is a, c, g, or t
  misc_feature (2235)..(2235): n is a, c, g, or t
  misc_feature (2238)..(2238): n is a, c, g, or t
  misc_feature (2241)..(2241): n is a, c, g, or t
  misc_feature (2244)..(2244): n is a, c, g, or t
  misc_feature (2247)..(2247): n is a, c, g, or t
  misc_feature (2250)..(2250): n is a, c, g, or t
  misc_feature (2253)..(2253): n is a, c, g, or t
  misc_feature (2256)..(2256): n is a, c, g, or t
  misc_feature (2259)..(2259): n is a, c, g, or t
  misc_feature (2262)..(2262): n is a, c, g, or t
  misc_feature (2271)..(2271): n is a, c, g, or t
  misc_feature (2277)..(2277): n is a, c, g, or t
  misc_feature (2280)..(2280): n is a, c, g, or t
  misc_feature (2289)..(2289): n is a, c, g, or t
  misc_feature (2295)..(2295): n is a, c, g, or t
  misc_feature (2298)..(2298): n is a, c, g, or t
  misc_feature (2301)..(2301): n is a, c, g, or t
  misc_feature (2307)..(2307): n is a, c, g, or t
  misc_feature (2310)..(2310): n is a, c, g, or t
  misc_feature (2313)..(2313): n is a, c, g, or t
  misc_feature (2316)..(2316): n is a, c, g, or t
  misc_feature (2319)..(2319): n is a, c, g, or t
  misc_feature (2322)..(2322): n is a, c, g, or t
  misc_feature (2325)..(2325): n is a, c, g, or t
  misc_feature (2328)..(2328): n is a, c, g, or t
  misc_feature (2331)..(2331): n is a, c, g, or t
  misc_feature (2334)..(2334): n is a, c, g, or t
  misc_feature (2340)..(2340): n is a, c, g, or t
  misc_feature (2343)..(2343): n is a, c, g, or t
  misc_feature (2349)..(2349): n is a, c, g, or t
  misc_feature (2352)..(2352): n is a, c, g, or t
  misc_feature (2358)..(2358): n is a, c, g, or t
  misc_feature (2361)..(2361): n is a, c, g, or t
  misc_feature (2367)..(2367): n is a, c, g, or t
  misc_feature (2370)..(2370): n is a, c, g, or t
  misc_feature (2376)..(2376): n is a, c, g, or t
  misc_feature (2379)..(2379): n is a, c, g, or t
  misc_feature (2385)..(2385): n is a, c, g, or t
  misc_feature (2388)..(2388): n is a, c, g, or t
  misc_feature (2391)..(2391): n is a, c, g, or t
  misc_feature (2394)..(2394): n is a, c, g, or t
  misc_feature (2397)..(2397): n is a, c, g, or t
  misc_feature (2400)..(2400): n is a, c, g, or t
  misc_feature (2403)..(2403): n is a, c, g, or t
  misc_feature (2406)..(2406): n is a, c, g, or t
  misc_feature (2409)..(2409): n is a, c, g, or t
  misc_feature (2412)..(2412): n is a, c, g, or t
  misc_feature (2415)..(2415): n is a, c, g, or t
  misc_feature (2421)..(2421): n is a, c, g, or t
  misc_feature (2424)..(2424): n is a, c, g, or t
  misc_feature (2427)..(2427): n is a, c, g, or t
  misc_feature (2430)..(2430): n is a, c, g, or t
  misc_feature (2433)..(2433): n is a, c, g, or t
  misc_feature (2436)..(2436): n is a, c, g, or t
  misc_feature (2439)..(2439): n is a, c, g, or t
  misc_feature (2442)..(2442): n is a, c, g, or t
  misc_feature (2451)..(2451): n is a, c, g, or t
  misc_feature (2454)..(2454): n is a, c, g, or t
  misc_feature (2457)..(2457): n is a, c, g, or t
  misc_feature (2460)..(2460): n is a, c, g, or t
  misc_feature (2463)..(2463): n is a, c, g, or t
  misc_feature (2466)..(2466): n is a, c, g, or t
  misc_feature (2469)..(2469): n is a, c, g, or t
  misc_feature (2472)..(2472): n is a, c, g, or t
  misc_feature (2475)..(2475): n is a, c, g, or t
  misc_feature (2478)..(2478): n is a, c, g, or t
  misc_feature (2481)..(2481): n is a, c, g, or t
  misc_feature (2487)..(2487): n is a, c, g, or t
  misc_feature (2490)..(2490): n is a, c, g, or t
  misc_feature (2493)..(2493): n is a, c, g, or t
  misc_feature (2496)..(2496): n is a, c, g, or t
  misc_feature (2502)..(2502): n is a, c, g, or t
  misc_feature (2505)..(2505): n is a, c, g, or t
  misc_feature (2508)..(2508): n is a, c, g, or t
  misc_feature (2514)..(2514): n is a, c, g, or t
  misc_feature (2517)..(2517): n is a, c, g, or t
  misc_feature (2520)..(2520): n is a, c, g, or t
  misc_feature (2523)..(2523): n is a, c, g, or t
  misc_feature (2532)..(2532): n is a, c, g, or t
  misc_feature (2535)..(2535): n is a, c, g, or t
  misc_feature (2538)..(2538): n is a, c, g, or t
  misc_feature (2541)..(2541): n is a, c, g, or t
  misc_feature (2544)..(2544): n is a, c, g, or t
  misc_feature (2550)..(2550): n is a, c, g, or t
  misc_feature (2553)..(2553): n is a, c, g, or t
  misc_feature (2556)..(2556): n is a, c, g, or t
  misc_feature (2559)..(2559): n is a, c, g, or t
  misc_feature (2565)..(2565): n is a, c, g, or t
  misc_feature (2568)..(2568): n is a, c, g, or t
  misc_feature (2574)..(2574): n is a, c, g, or t
  misc_feature (2577)..(2577): n is a, c, g, or t
  misc_feature (2583)..(2583): n is a, c, g, or t
  misc_feature (2586)..(2586): n is a, c, g, or t
  misc_feature (2589)..(2589): n is a, c, g, or t
  misc_feature (2592)..(2592): n is a, c, g, or t
  misc_feature (2595)..(2595): n is a, c, g, or t
  misc_feature (2598)..(2598): n is a, c, g, or t
  misc_feature (2601)..(2601): n is a, c, g, or t
  misc_feature (2604)..(2604): n is a, c, g, or t
  misc_feature (2607)..(2607): n is a, c, g, or t
  misc_feature (2613)..(2613): n is a, c, g, or t
  misc_feature (2616)..(2616): n is a, c, g, or t
  misc_feature (2619)..(2619): n is a, c, g, or t
  misc_feature (2622)..(2622): n is a, c, g, or t
  misc_feature (2625)..(2625): n is a, c, g, or t
  misc_feature (2628)..(2628): n is a, c, g, or t
  misc_feature (2631)..(2631): n is a, c, g, or t
  misc_feature (2634)..(2634): n is a, c, g, or t
  misc_feature (2637)..(2637): n is a, c, g, or t
  misc_feature (2640)..(2640): n is a, c, g, or t
  misc_feature (2643)..(2643): n is a, c, g, or t
  misc_feature (2646)..(2646): n is a, c, g, or t
  misc_feature (2649)..(2649): n is a, c, g, or t
  misc_feature (2655)..(2655): n is a, c, g, or t
  misc_feature (2658)..(2658): n is a, c, g, or t
  misc_feature (2664)..(2664): n is a, c, g, or t
  misc_feature (2667)..(2667): n is a, c, g, or t
  misc_feature (2673)..(2673): n is a, c, g, or t
  misc_feature (2676)..(2676): n is a, c, g, or t
  misc_feature (2679)..(2679): n is a, c, g, or t
  misc_feature (2682)..(2682): n is a, c, g, or t
  misc_feature (2685)..(2685): n is a, c, g, or t
  misc_feature (2688)..(2688): n is a, c, g, or t
  misc_feature (2694)..(2694): n is a, c, g, or t
  misc_feature (2697)..(2697): n is a, c, g, or t
  misc_feature (2700)..(2700): n is a, c, g, or t
  misc_feature (2703)..(2703): n is a, c, g, or t
  misc_feature (2706)..(2706): n is a, c, g, or t
  misc_feature (2709)..(2709): n is a, c, g, or t
  misc_feature (2712)..(2712): n is a, c, g, or t
  misc_feature (2718)..(2718): n is a, c, g, or t
  misc_feature (2721)..(2721): n is a, c, g, or t
  misc_feature (2724)..(2724): n is a, c, g, or t
  misc_feature (2727)..(2727): n is a, c, g, or t
  misc_feature (2730)..(2730): n is a, c, g, or t
  misc_feature (2733)..(2733): n is a, c, g, or t
  misc_feature (2739)..(2739): n is a, c, g, or t
  misc_feature (2742)..(2742): n is a, c, g, or t
  misc_feature (2745)..(2745): n is a, c, g, or t
  misc_feature (2748)..(2748): n is a, c, g, or t
  misc_feature (2757)..(2757): n is a, c, g, or t
  misc_feature (2766)..(2766): n is a, c, g, or t
  misc_feature (2772)..(2772): n is a, c, g, or t
  misc_feature (2775)..(2775): n is a, c, g, or t
  misc_feature (2781)..(2781): n is a, c, g, or t
  misc_feature (2784)..(2784): n is a, c, g, or t
  misc_feature (2793)..(2793): n is a, c, g, or t
  misc_feature (2799)..(2799): n is a, c, g, or t
  misc_feature (2802)..(2802): n is a, c, g, or t
  misc_feature (2808)..(2808): n is a, c, g, or t
  misc_feature (2811)..(2811): n is a, c, g, or t
  misc_feature (2814)..(2814): n is a, c, g, or t
  misc_feature (2820)..(2820): n is a, c, g, or t
  misc_feature (2823)..(2823): n is a, c, g, or t
  misc_feature (2826)..(2826): n is a, c, g, or t
  misc_feature (2829)..(2829): n is a, c, g, or t
  misc_feature (2832)..(2832): n is a, c, g, or t
  misc_feature (2835)..(2835): n is a, c, g, or t
  misc_feature (2838)..(2838): n is a, c, g, or t
  misc_feature (2841)..(2841): n is a, c, g, or t
  misc_feature (2847)..(2847): n is a, c, g, or t
  misc_feature (2856)..(2856): n is a, c, g, or t
  misc_feature (2859)..(2859): n is a, c, g, or t
  misc_feature (2862)..(2862): n is a, c, g, or t
  misc_feature (2865)..(2865): n is a, c, g, or t
  misc_feature (2871)..(2871): n is a, c, g, or t
  misc_feature (2874)..(2874): n is a, c, g, or t
  misc_feature (2877)..(2877): n is a, c, g, or t
  misc_feature (2883)..(2883): n is a, c, g, or t
  misc_feature (2886)..(2886): n is a, c, g, or t
  misc_feature (2889)..(2889): n is a, c, g, or t
  misc_feature (2892)..(2892): n is a, c, g, or t
  misc_feature (2895)..(2895): n is a, c, g, or t
  misc_feature (2898)..(2898): n is a, c, g, or t
  misc_feature (2901)..(2901): n is a, c, g, or t
  misc_feature (2904)..(2904): n is a, c, g, or t
  misc_feature (2907)..(2907): n is a, c, g, or t
  misc_feature (2910)..(2910): n is a, c, g, or t
  misc_feature (2913)..(2913): n is a, c, g, or t
  misc_feature (2916)..(2916): n is a, c, g, or t
  misc_feature (2919)..(2919): n is a, c, g, or t
  misc_feature (2928)..(2928): n is a, c, g, or t
  misc_feature (2934)..(2934): n is a, c, g, or t
  misc_feature (2937)..(2937): n is a, c, g, or t
  misc_feature (2940)..(2940): n is a, c, g, or t
  misc_feature (2943)..(2943): n is a, c, g, or t
  misc_feature (2946)..(2946): n is a, c, g, or t
  misc_feature (2949)..(2949): n is a, c, g, or t
  misc_feature (2955)..(2955): n is a, c, g, or t
  misc_feature (2958)..(2958): n is a, c, g, or t
  misc_feature (2961)..(2961): n is a, c, g, or t
  misc_feature (2964)..(2964): n is a, c, g, or t
  misc_feature (2967)..(2967): n is a, c, g, or t
  misc_feature (2970)..(2970): n is a, c, g, or t
  misc_feature (2973)..(2973): n is a, c, g, or t
  misc_feature (2976)..(2976): n is a, c, g, or t
  misc_feature (2979)..(2979): n is a, c, g, or t
  misc_feature (2982)..(2982): n is a, c, g, or t
  misc_feature (2988)..(2988): n is a, c, g, or t
  misc_feature (2991)..(2991): n is a, c, g, or t
  misc_feature (2994)..(2994): n is a, c, g, or t
  misc_feature (3000)..(3000): n is a, c, g, or t
  misc_feature (3003)..(3003): n is a, c, g, or t
  misc_feature (3006)..(3006): n is a, c, g, or t
  misc_feature (3009)..(3009): n is a, c, g, or t
  misc_feature (3015)..(3015): n is a, c, g, or t
  misc_feature (3018)..(3018): n is a, c, g, or t
  misc_feature (3021)..(3021): n is a, c, g, or t
  misc_feature (3024)..(3024): n is a, c, g, or t
  misc_feature (3027)..(3027): n is a, c, g, or t
  misc_feature (3030)..(3030): n is a, c, g, or t
  misc_feature (3033)..(3033): n is a, c, g, or t
  misc_feature (3036)..(3036): n is a, c, g, or t
  misc_feature (3039)..(3039): n is a, c, g, or t
  misc_feature (3042)..(3042): n is a, c, g, or t
  misc_feature (3045)..(3045): n is a, c, g, or t
  misc_feature (3051)..(3051): n is a, c, g, or t
ggnwsngtnggnccngtnggnccnmgnggnccncarggnytncarggncarcarggnggngcnggnccnacnggnccnccnggngarccnggngayccnggnccnatgggnccnathggnwsnmgnggnccngarggnccnccnggnaarccnggngargayggngarccnggnmgnaayggnaayccnggngargtnggnttygcnggnwsnccnggngcnmgnggnttyccnggngcnccnggnytnccnggnytnaarggncaymgnggncayaarggnytngarggnccnaarggngargtnggngcnccnggnwsnaarggngargcnggnccnacnggnccnatgggngcnatgggnccnytnggnccnmgnggnatgccnggngarmgnggnmgnytnggnccncarggngcnccnggncarmgnggngcncayggnatgccnggnaarccnggnccnatgggnccnytnggnathccnggnwsnwsnggnttyccnggnaayccnggnatgaarggngargcnggnccnacnggngcnmgnggnccngarggnccncarggncarmgnggngaracnggnccnccnggnccngtnggnwsnccnggnytnccnggngcnathggnacngayggnacnccnggngcnaarggnccnacnggnwsnccnggnacnwsnggnccnccnggnwsngcnggnccnccnggnwsnccnggnccncarggnwsnacnggnccncarggnathmgnggncarccnggngayccnggngtnccnggnttyaarggngargcnggnccnaarggngarccnggnccncayggnathcarggnccnathggnccnccnggngargarggnaarmgnggnccnmgnggngayccnggnacngtnggnccnccnggnccngtnggngarmgnggngcnccnggnaaymgnggnttyccnggnwsngayggnytnccnggnccnaarggngcncarggngarmgnggnccngtnggnwsnwsnggnccnaarggnwsncarggngayccnggnmgnccnggngarccnggnytnccnggngcnmgnggnytnacnggnaayccnggngtncarggnccngarggnaarytnggnccnytnggngcnccnggngargayggnmgnccnggnccnccnggnwsnathggnathmgnggncarccnggnwsnatgggnytnccnggnccnaarggnwsnwsnggngayccnggnaarccnggngargcnggnaaygcnggngtnccnggncarmgnggngcnccnggnaargayggngargtnggnccnwsnggnccngtnggnccnccnggnytngcnggngarmgnggngarcarggnccnccnggnccnacnggnttycarggnytnccnggnccnccnggnccnccnggngarggnggnaarccnggngaycarggngtnccnggngayccnggngcngtnggnccnytnggnccnmgnggngarmgnggnaayccnggngarmgnggngarccnggnathacnggnytnccnggngaraarggnatggcnggnggncayggnccngayggnccnaarggnwsnccnggnccnwsnggnacnccnggngayacnggnccnccnggnytncarggnatgccnggngarmgnggnathgcnggnacnccnggnccnaarggngaymgnggnggnathggngaraarggngcngarggnacngcnggnaaygayggngcnmgnggnytnccnggnccnytnggnccnccnggnccngcnggnccnacnggngaraarggngarccnggnccnmgnggnytngtnggnccnccnggnwsnmgnggnaayccnggnwsnmgnggngaraayggnccnacnggngcngtnggnttygcnggnccncarggnccngayggncarccnggngtnaarggngarccnggngarccnggncaraarggngaygcnggnwsnccnggnccncarggnytngcnggnwsnccnggnccncayggnccnaayggngtnccnggnytnaarggnggnmgnggnacncarggnccnccnggngcnacnggnttyccnggnwsngcnggnmgngtnggnccnccnggnccngcnggngcnccnggnccngcnggnccnytnggngarccnggnaargarggnccnccnggnytnmgnggngayccnggnwsncayggnmgngtnggngaymgnggnccngcnggnccnccnggnggnccnggngayaarggngayccnggngargayggncarccnggnccngayggnccnccnggnccngcnggnacnacnggncarmgnggnathgtnggnatgccnggncarmgnggngarmgnggnatgccnggnytnccnggnccngcnggnacnccnggnaargtnggnccnacnggngcnacnggngayaarggnccnccnggnccngtnggnccnccnggnwsnaayggnccngtnggngarccnggnccngarggnccngcnggnaaygayggnacnccnggnmgngayggngcngtnggngarmgnggngaymgnggngayccnggnccngcnggnytnccnggnwsncarggngcnccnggnacnccnggnccngtnggngcnccnggngaygcnggncarmgnggngayccnggnwsnmgnggnccnathggnccnccnggnmgngcnggnaarmgnggnytnccnggnccncarggnccnmgnggngayaarggngaycayggngaymgnggngaymgnggncaraarggncaymgnggnttyacnggnytncarggnytnccnggnccnccnggnccnaayggngarcarggnwsngcnggnathccnggnccnttyggnccnmgnggnccnccnggnccngtnggnccnwsnggnaargarggnaayccnggnccnytnggnccnathggnccnccnggngtnmgnggnwsngtnggngargcnggnccngarggnccnccnggngarccnggnccnccnggnccnccnggnccnccnggncayytn

SEQ ID NO: 1108 - DNA, 3033 bp, Artificial Sequence
  hCol-CNA13 (alpha3(V) THD)
  misc_feature (3)..(3): n is a, c, g, or t
  misc_feature (6)..(6): n is a, c, g, or t
  misc_feature (9)..(9): n is a, c, g, or t
  misc_feature (12)..(12): n is a, c, g, or t
  misc_feature (15)..(15): n is a, c, g, or t
  misc_feature (18)..(18): n is a, c, g, or t
  misc_feature (21)..(21): n is a, c, g, or t
  misc_feature (24)..(24): n is a, c, g, or t
  misc_feature (27)..(27): n is a, c, g, or t
  misc_feature (30)..(30): n is a, c, g, or t
  misc_feature (33)..(33): n is a, c, g, or t
  misc_feature (36)..(36): n is a, c, g, or t
  misc_feature (39)..(39): n is a, c, g, or t
  misc_feature (42)..(42): n is a, c, g, or t
  misc_feature (45)..(45): n is a, c, g, or t
  misc_feature (48)..(48): n is a, c, g, or t
  misc_feature (51)..(51): n is a, c, g, or t
  misc_feature (54)..(54): n is a, c, g, or t
  misc_feature (57)..(57): n is a, c, g, or t
  misc_feature (63)..(63): n is a, c, g, or t
  misc_feature (66)..(66): n is a, c, g, or t
  misc_feature (69)..(69): n is a, c, g, or t
  misc_feature (75)..(75): n is a, c, g, or t
  misc_feature (84)..(84): n is a, c, g, or t
  misc_feature (87)..(87): n is a, c, g, or t
  misc_feature (93)..(93): n is a, c, g, or t
  misc_feature (96)..(96): n is a, c, g, or t
  misc_feature (102)..(102): n is a, c, g, or t
  misc_feature (105)..(105): n is a, c, g, or t
  misc_feature (108)..(108): n is a, c, g, or t
  misc_feature (111)..(111): n is a, c, g, or t
  misc_feature (114)..(114): n is a, c, g, or t
  misc_feature (120)..(120): n is a, c, g, or t
  misc_feature (123)..(123): n is a, c, g, or t
  misc_feature (129)..(129): n is a, c, g, or t
  misc_feature (132)..(132): n is a, c, g, or t
  misc_feature (135)..(135): n is a, c, g, or t
  misc_feature (138)..(138): n is a, c, g, or t
  misc_feature (141)..(141): n is a, c, g, or t
  misc_feature (144)..(144): n is a, c, g, or t
  misc_feature (147)..(147): n is a, c, g, or t
  misc_feature (156)..(156): n is a, c, g, or t
  misc_feature (159)..(159): n is a, c, g, or t
  misc_feature (162)..(162): n is a, c, g, or t
  misc_feature (165)..(165): n is a, c, g, or t
  misc_feature (168)..(168): n is a, c, g, or t
  misc_feature (174)..(174): n is a, c, g, or t
  misc_feature (177)..(177): n is a, c, g, or t
  misc_feature (180)..(180): n is a, c, g, or t
  misc_feature (183)..(183): n is a, c, g, or t
  misc_feature (186)..(186): n is a, c, g, or t
  misc_feature (189)..(189): n is a, c, g, or t
  misc_feature (192)..(192): n is a, c, g, or t
  misc_feature (198)..(198): n is a, c, g, or t
  misc_feature (201)..(201): n is a, c, g, or t
  misc_feature (204)..(204): n is a, c, g, or t
  misc_feature (210)..(210): n is a, c, g, or t
  misc_feature (216)..(216): n is a, c, g, or t
  misc_feature (219)..(219): n is a, c, g, or t
  misc_feature (228)..(228): n is a, c, g, or t
  misc_feature (231)..(231): n is a, c, g, or t
  misc_feature (234)..(234): n is a, c, g, or t
  misc_feature (237)..(237): n is a, c, g, or t
  misc_feature (240)..(240): n is a, c, g, or t
  misc_feature (243)..(243): n is a, c, g, or t
  misc_feature (246)..(246): n is a, c, g, or t
  misc_feature (255)..(255): n is a, c, g, or t
  misc_feature (261)..(261): n is a, c, g, or t
  misc_feature (264)..(264): n is a, c, g, or t
  misc_feature (273)..(273): n is a, c, g, or t
  misc_feature (279)..(279): n is a, c, g, or t
  misc_feature (282)..(282): n is a, c, g, or t
  misc_feature (288)..(288): n is a, c, g, or t
  misc_feature (291)..(291): n is a, c, g, or t
  misc_feature (294)..(294): n is a, c, g, or t
  misc_feature (297)..(297): n is a, c, g, or t
  misc_feature (300)..(300): n is a, c, g, or t
  misc_feature (309)..(309): n is a, c, g, or t
  misc_feature (315)..(315): n is a, c, g, or t
  misc_feature (318)..(318): n is a, c, g, or t
  misc_feature (321)..(321): n is a, c, g, or t
  misc_feature (327)..(327): n is a, c, g, or t
  misc_feature (330)..(330): n is a, c, g, or t
  misc_feature (333)..(333): n is a, c, g, or t
  misc_feature (336)..(336): n is a, c, g, or t
  misc_feature (339)..(339): n is a, c, g, or t
  misc_feature (342)..(342): n is a, c, g, or t
  misc_feature (345)..(345): n is a, c, g, or t
  misc_feature (351)..(351): n is a, c, g, or t
  misc_feature (354)..(354): n is a, c, g, or t
  misc_feature (360)..(360): n is a, c, g, or t
  misc_feature (363)..(363): n is a, c, g, or t
  misc_feature (366)..(366): n is a, c, g, or t
  misc_feature (369)..(369): n is a, c, g, or t
  misc_feature (372)..(372): n is a, c, g, or t
  misc_feature (375)..(375): n is a, c, g, or t
  misc_feature (378)..(378): n is a, c, g, or t
  misc_feature (381)..(381): n is a, c, g, or t
  misc_feature (384)..(384): n is a, c, g, or t
  misc_feature (387)..(387): n is a, c, g, or t
  misc_feature (390)..(390): n is a, c, g, or t
  misc_feature (393)..(393): n is a, c, g, or t
  misc_feature (396)..(396): n is a, c, g, or t
  misc_feature (399)..(399): n is a, c, g, or t
  misc_feature (402)..(402): n is a, c, g, or t
  misc_feature (405)..(405): n is a, c, g, or t
  misc_feature (408)..(408): n is a, c, g, or t
  misc_feature (411)..(411): n is a, c, g, or t
  misc_feature (414)..(414): n is a, c, g, or t
  misc_feature (417)..(417): n is a, c, g, or t
  misc_feature (420)..(420): n is a, c, g, or t
  misc_feature (423)..(423): n is a, c, g, or t
  misc_feature (426)..(426): n is a, c, g, or t
  misc_feature (435)..(435): n is a, c, g, or t
  misc_feature (438)..(438): n is a, c, g, or t
  misc_feature (441)..(441): n is a, c, g, or t
  misc_feature (444)..(444): n is a, c, g, or t
  misc_feature (447)..(447): n is a, c, g, or t
  misc_feature (453)..(453): n is a, c, g, or t
  misc_feature (459)..(459): n is a, c, g, or t
  misc_feature (462)..(462): n is a, c, g, or t
  misc_feature (465)..(465): n is a, c, g, or t
  misc_feature (468)..(468): n is a, c, g, or t
  misc_feature (471)..(471): n is a, c, g, or t
  misc_feature (477)..(477): n is a, c, g, or t
  misc_feature (480)..(480): n is a, c, g, or t
  misc_feature (483)..(483): n is a, c, g, or t
  misc_feature (486)..(486): n is a, c, g, or t
  misc_feature (489)..(489): n is a, c, g, or t
  misc_feature (498)..(498): n is a, c, g, or t
  misc_feature (507)..(507): n is a, c, g, or t
  misc_feature (510)..(510): n is a, c, g, or t
  misc_feature (516)..(516): n is a, c, g, or t
  misc_feature (519)..(519): n is a, c, g, or t
  misc_feature (522)..(522): n is a, c, g, or t
  misc_feature (525)..(525): n is a, c, g, or t
  misc_feature (528)..(528): n is a, c, g, or t
  misc_feature (534)..(534): n is a, c, g, or t
  misc_feature (537)..(537): n is a, c, g, or t
  misc_feature (543)..(543): n is a, c, g, or t
  misc_feature (546)..(546): n is a, c, g, or t
  misc_feature (549)..(549): n is a, c, g, or t
  misc_feature (552)..(552): n is a, c, g, or t
  misc_feature (561)..(561): n is a, c, g, or t
  misc_feature (564)..(564): n is a, c, g, or t
  misc_feature (567)..(567): n is a, c, g, or t
  misc_feature (570)..(570): n is a, c, g, or t
  misc_feature (576)..(576): n is a, c, g, or t
  misc_feature (579)..(579): n is a, c, g, or t
  misc_feature (585)..(585): n is a, c, g, or t
  misc_feature (588)..(588): n is a, c, g, or t
  misc_feature (591)..(591): n is a, c, g, or t
  misc_feature (594)..(594): n is a, c, g, or t
  misc_feature (597)..(597): n is a, c, g, or t
  misc_feature (600)..(600): n is a, c, g, or t
  misc_feature (606)..(606): n is a, c, g, or t
  misc_feature (609)..(609): n is a, c, g, or t
  misc_feature (612)..(612): n is a, c, g, or t
  misc_feature (615)..(615): n is a, c, g, or t
  misc_feature (621)..(621): n is a, c, g, or t
  misc_feature (624)..(624): n is a, c, g, or t
  misc_feature (633)..(633): n is a, c, g, or t
  misc_feature (636)..(636): n is a, c, g, or t
  misc_feature (639)..(639): n is a, c, g, or t
  misc_feature (642)..(642): n is a, c, g, or t
  misc_feature (651)..(651): n is a, c, g, or t
  misc_feature (654)..(654): n is a, c, g, or t
  misc_feature (660)..(660): n is a, c, g, or t
  misc_feature (663)..(663): n is a, c, g, or t
  misc_feature (666)..(666): n is a, c, g, or t
  misc_feature (669)..(669): n is a, c, g, or t
  misc_feature (672)..(672): n is a, c, g, or t
  misc_feature (675)..(675): n is a, c, g, or t
  misc_feature (678)..(678): n is a, c, g, or t
  misc_feature (681)..(681): n is a, c, g, or t
  misc_feature (684)..(684): n is a, c, g, or t
  misc_feature (687)..(687): n is a, c, g, or t
  misc_feature (693)..(693): n is a, c, g, or t
  misc_feature (696)..(696): n is a, c, g, or t
  misc_feature (699)..(699): n is a, c, g, or t
  misc_feature (702)..(702): n is a, c, g, or t
  misc_feature (705)..(705): n is a, c, g, or t
  misc_feature (708)..(708): n is a, c, g, or t
  misc_feature (714)..(714): n is a, c, g, or t
  misc_feature (717)..(717): n is a, c, g, or t
  misc_feature (720)..(720): n is a, c, g, or t
  misc_feature (723)..(723): n is a, c, g, or t
  misc_feature (729)..(729): n is a, c, g, or t
  misc_feature (732)..(732): n is a, c, g, or t
  misc_feature (735)..(735): n is a, c, g, or t
  misc_feature (741)..(741): n is a, c, g, or t
  misc_feature (750)..(750): n is a, c, g, or t
  misc_feature (759)..(759): n is a, c, g, or t
  misc_feature (768)..(768): n is a, c, g, or t
  misc_feature (774)..(774): n is a, c, g, or t
  misc_feature (777)..(777): n is a, c, g, or t
  misc_feature (786)..(786): n is a, c, g, or t
  misc_feature (792)..(792): n is a, c, g, or t
  misc_feature (795)..(795): n is a, c, g, or t
  misc_feature (798)..(798): n is a, c, g, or t
  misc_feature (804)..(804): n is a, c, g, or t
  misc_feature (813)..(813): n is a, c, g, or t
  misc_feature (819)..(819): n is a, c, g, or t
  misc_feature (822)..(822): n is a, c, g, or t
  misc_feature (825)..(825): n is a, c, g, or t
  misc_feature (828)..(828): n is a, c, g, or t
  misc_feature (831)..(831): n is a, c, g, or t
  misc_feature (834)..(834): n is a, c, g, or t
  misc_feature (837)..(837): n is a, c, g, or t
  misc_feature (840)..(840): n is a, c, g, or t
  misc_feature (849)..(849): n is a, c, g, or t
  misc_feature (852)..(852): n is a, c, g, or t
  misc_feature (858)..(858): n is a, c, g, or t
  misc_feature (861)..(861): n is a, c, g, or t
  misc_feature (867)..(867): n is a, c, g, or t
  misc_feature (873)..(873): n is a, c, g, or t
  misc_feature (876)..(876): n is a, c, g, or t
  misc_feature (882)..(882): n is a, c, g, or t
  misc_feature (885)..(885): n is a, c, g, or t
  misc_feature (894)..(894): n is a, c, g, or t
  misc_feature (897)..(897): n is a, c, g, or t
  misc_feature (900)..(900): n is a, c, g, or t
  misc_feature (903)..(903): n is a, c, g, or t
  misc_feature (906)..(906): n is a, c, g, or t
  misc_feature (909)..(909): n is a, c, g, or t
  misc_feature (912)..(912): n is a, c, g, or t
  misc_feature (921)..(921): n is a, c, g, or t
  misc_feature (927)..(927): n is a, c, g, or t
  misc_feature (930)..(930): n is a, c, g, or t
  misc_feature (933)..(933): n is a, c, g, or t
  misc_feature (936)..(936): n is a, c, g, or t
  misc_feature (939)..(939): n is a, c, g, or t
  misc_feature (942)..(942): n is a, c, g, or t
  misc_feature (945)..(945): n is a, c, g, or t
  misc_feature (948)..(948): n is a, c, g, or t
  misc_feature (954)..(954): n is a, c, g, or t
  misc_feature (957)..(957): n is a, c, g, or t
  misc_feature (960)..(960): n is a, c, g, or t
  misc_feature (963)..(963): n is a, c, g, or t
  misc_feature (966)..(966): n is a, c, g, or t
  misc_feature (969)..(969): n is a, c, g, or t
  misc_feature (975)..(975): n is a, c, g, or t
  misc_feature (978)..(978): n is a, c, g, or t
  misc_feature (984)..(984): n is a, c, g, or t
  misc_feature (990)..(990): n is a, c, g, or t
  misc_feature (993)..(993): n is a, c, g, or t
  misc_feature (996)..(996): n is a, c, g, or t
  misc_feature (999)..(999): n is a, c, g, or t
  misc_feature (1002)..(1002): n is a, c, g, or t
  misc_feature (1005)..(1005): n is a, c, g, or t
  misc_feature (1011)..(1011): n is a, c, g, or t
  misc_feature (1020)..(1020): n is a, c, g, or t
  misc_feature (1026)..(1026): n is a, c, g, or t
  misc_feature (1029)..(1029): n is a, c, g, or t
  misc_feature (1035)..(1035): n is a, c, g, or t
  misc_feature (1038)..(1038): n is a, c, g, or t
  misc_feature (1044)..(1044): n is a, c, g, or t
  misc_feature (1047)..(1047): n is a, c, g, or t
  misc_feature (1050)..(1050): n is a, c, g, or t
  misc_feature (1056)..(1056): n is a, c, g, or t
  misc_feature (1062)..(1062): n is a, c, g, or t
  misc_feature (1065)..(1065): n is a, c, g, or t
  misc_feature (1068)..(1068): n is a, c, g, or t
  misc_feature (1071)..(1071): n is a, c, g, or t
  misc_feature (1074)..(1074): n is a, c, g, or t
  misc_feature (1077)..(1077): n is a, c, g, or t
  misc_feature (1080)..(1080): n is a, c, g, or t
  misc_feature (1083)..(1083): n is a, c, g, or t
  misc_feature (1089)..(1089): n is a, c, g, or t
  misc_feature (1092)..(1092): n is a, c, g, or t
  misc_feature (1098)..(1098): n is a, c, g, or t
  misc_feature (1101)..(1101): n is a, c, g, or t
  misc_feature (1104)..(1104): n is a, c, g, or t
  misc_feature (1107)..(1107): n is a, c, g, or t
  misc_feature (1110)..(1110): n is a, c, g, or t
  misc_feature (1116)..(1116): n is a, c, g, or t
  misc_feature (1119)..(1119): n is a, c, g, or t
  misc_feature (1122)..(1122): n is a, c, g, or t
  misc_feature (1128)..(1128): n is a, c, g, or t
  misc_feature (1134)..(1134): n is a, c, g, or t
  misc_feature (1137)..(1137): n is a, c, g, or t
  misc_feature (1146)..(1146): n is a, c, g, or t
  misc_feature (1149)..(1149): n is a, c, g, or t
  misc_feature (1152)..(1152): n is a, c, g, or t
  misc_feature (1155)..(1155): n is a, c, g, or t
  misc_feature (1161)..(1161): n is a, c, g, or t
  misc_feature (1164)..(1164): n is a, c, g, or t
  misc_feature (1173)..(1173): n is a, c, g, or t
  misc_feature (1176)..(1176): n is a, c, g, or t
  misc_feature (1179)..(1179): n is a, c, g, or t
  misc_feature (1182)..(1182): n is a, c, g, or t
  misc_feature (1185)..(1185): n is a, c, g, or t
  misc_feature (1191)..(1191): n is a, c, g, or t
  misc_feature (1194)..(1194): n is a, c, g, or t
  misc_feature (1197)..(1197): n is a, c, g, or t
  misc_feature (1200)..(1200): n is a, c, g, or t
  misc_feature (1206)..(1206): n is a, c, g, or t
  misc_feature (1209)..(1209): n is a, c, g, or t
  misc_feature (1212)..(1212): n is a, c, g, or t
  misc_feature (1218)..(1218): n is a, c, g, or t
  misc_feature (1221)..(1221): n is a, c, g, or t
  misc_feature (1224)..(1224): n is a, c, g, or t
  misc_feature (1227)..(1227): n is a, c, g, or t
  misc_feature (1236)..(1236): n is a, c, g, or t
  misc_feature (1245)..(1245): n is a, c, g, or t
  misc_feature (1248)..(1248): n is a, c, g, or t
  misc_feature (1251)..(1251): n is a, c, g, or t
  misc_feature (1254)..(1254): n is a, c, g, or t
  misc_feature (1260)..(1260): n is a, c, g, or t
  misc_feature (1263)..(1263): n is a, c, g, or t
  misc_feature (1269)..(1269): n is a, c, g, or t
  misc_feature (1272)..(1272): n is a, c, g, or t
  misc_feature (1278)..(1278): n is a, c, g, or t
  misc_feature (1281)..(1281): n is a, c, g, or t
  misc_feature (1290)..(1290): n is a, c, g, or t
  misc_feature (1296)..(1296): n is a, c, g, or t
  misc_feature (1299)..(1299): n is a, c, g, or t
  misc_feature (1302)..(1302): n is a, c, g, or t
  misc_feature (1305)..(1305): n is a, c, g, or t
  misc_feature (1308)..(1308): n is a, c, g, or t
  misc_feature (1311)..(1311): n is a, c, g, or t
  misc_feature (1314)..(1314): n is a, c, g, or t
  misc_feature (1317)..(1317): n is a, c, g, or t
  misc_feature (1320)..(1320): n is a, c, g, or t
  misc_feature (1323)..(1323): n is a, c, g, or t
  misc_feature (1326)..(1326): n is a, c, g, or t
  misc_feature (1329)..(1329): n is a, c, g, or t
  misc_feature (1335)..(1335): n is a, c, g, or t
  misc_feature (1341)..(1341): n is a, c, g, or t
  misc_feature (1344)..(1344): n is a, c, g, or t
  misc_feature (1350)..(1350): n is a, c, g, or t
  misc_feature (1353)..(1353): n is a, c, g, or t
  misc_feature (1356)..(1356): n is a, c, g, or t
  misc_feature (1359)..(1359): n is a, c, g, or t
  misc_feature (1362)..(1362): n is a, c, g, or t
  misc_feature (1368)..(1368): n is a, c, g, or t
  misc_feature (1371)..(1371): n is a, c, g, or t
  misc_feature (1374)..(1374): n is a, c, g, or t
  misc_feature (1377)..(1377): n is a, c, g, or t
  misc_feature (1380)..(1380): n is a, c, g, or t
  misc_feature (1383)..(1383): n is a, c, g, or t
  misc_feature (1386)..(1386): n is a, c, g, or t
  misc_feature (1389)..(1389): n is a, c, g, or t
  misc_feature (1392)..(1392): n is a, c, g, or t
  misc_feature (1395)..(1395): n is a, c, g, or t
  misc_feature (1398)..(1398): n is a, c, g, or t
  misc_feature (1407)..(1407): n is a, c, g, or t
  misc_feature (1410)..(1410): n is a, c, g, or t
  misc_feature (1413)..(1413): n is a, c, g, or t
  misc_feature (1416)..(1416): n is a, c, g, or t
  misc_feature (1419)..(1419): n is a, c, g, or t
  misc_feature (1425)..(1425): n is a, c, g, or t
  misc_feature (1428)..(1428): n is a, c, g, or t
  misc_feature (1434)..(1434): n is a, c, g, or t
  misc_feature (1437)..(1437): n is a, c, g, or t
  misc_feature (1443)..(1443): n is a, c, g, or t
  misc_feature (1449)..(1449): n is a, c, g, or t
  misc_feature (1452)..(1452): n is a, c, g, or t
  misc_feature (1455)..(1455): n is a, c, g, or t
  misc_feature (1458)..(1458): n is a, c, g, or t
  misc_feature (1461)..(1461): n is a, c, g, or t
  misc_feature (1464)..(1464): n is a, c, g, or t
  misc_feature (1467)..(1467): n is a, c, g, or t
  misc_feature (1470)..(1470): n is a, c, g, or t
  misc_feature (1479)..(1479): n is a, c, g, or t
  misc_feature (1482)..(1482): n is a, c, g, or t
  misc_feature (1485)..(1485): n is a, c, g, or t
  misc_feature (1488)..(1488): n is a, c, g, or t
  misc_feature (1491)..(1491): n is a, c, g, or t
  misc_feature (1494)..(1494): n is a, c, g, or t
  misc_feature (1497)..(1497): n is a, c, g, or t
  misc_feature (1503)..(1503): n is a, c, g, or t
  misc_feature (1506)..(1506): n is a, c, g, or t
  misc_feature (1509)..(1509): n is a, c, g, or t
  misc_feature (1515)..(1515): n is a, c, g, or t
  misc_feature (1518)..(1518): n is a, c, g, or t
  misc_feature (1521)..(1521): n is a, c, g, or t
  misc_feature (1524)..(1524): n is a, c, g, or t
  misc_feature (1530)..(1530): n is a, c, g, or t
  misc_feature (1533)..(1533): n is a, c, g, or t
  misc_feature (1536)..(1536): n is a, c, g, or t
  misc_feature (1539)..(1539): n is a, c, g, or t
  misc_feature (1542)..(1542): n is a, c, g, or t
  misc_feature (1545)..(1545): n is a, c, g, or t
  misc_feature (1551)..(1551): n is a, c, g, or t
  misc_feature (1560)..(1560): n is a, c, g, or t
  misc_feature (1563)..(1563): n is a, c, g, or t
  misc_feature (1566)..(1566): n is a, c, g, or t
  misc_feature (1569)..(1569): n is a, c, g, or t
  misc_feature (1572)..(1572): n is a, c, g, or t
  misc_feature (1575)..(1575): n is a, c, g, or t
  misc_feature (1578)..(1578): n is a, c, g, or t
  misc_feature (1581)..(1581): n is a, c, g, or t
  misc_feature (1587)..(1587): n is a, c, g, or t
  misc_feature (1590)..(1590): n is a, c, g, or t
  misc_feature (1593)..(1593): n is a, c, g, or t
  misc_feature (1596)..(1596): n is a, c, g, or t
  misc_feature (1602)..(1602): n is a, c, g, or t
  misc_feature (1605)..(1605): n is a, c, g, or t
  misc_feature (1608)..(1608): n is a, c, g, or t
  misc_feature (1611)..(1611): n is a, c, g, or t
  misc_feature (1614)..(1614): n is a, c, g, or t
  misc_feature (1617)..(1617): n is a, c, g, or t
  misc_feature (1620)..(1620): n is a, c, g, or t
  misc_feature (1623)..(1623): n is a, c, g, or t
  misc_feature (1626)..(1626): n is a, c, g, or t
  misc_feature (1632)..(1632): n is a, c, g, or t
  misc_feature (1635)..(1635): n is a, c, g, or t
  misc_feature (1638)..(1638): n is a, c, g, or t
  misc_feature (1641)..(1641): n is a, c, g, or t
  misc_feature (1647)..(1647): n is a, c, g, or t
  misc_feature (1650)..(1650): n is a, c, g, or t
  misc_feature (1653)..(1653): n is a, c, g, or t
  misc_feature (1659)..(1659): n is a, c, g, or t
  misc_feature (1662)..(1662): n is a, c, g, or t
  misc_feature (1665)..(1665): n is a, c, g, or t
  misc_feature (1668)..(1668): n is a, c, g, or t
  misc_feature (1671)..(1671): n is a, c, g, or t
  misc_feature (1674)..(1674): n is a, c, g, or t
  misc_feature (1677)..(1677): n is a, c, g, or t
  misc_feature (1686)..(1686): n is a, c, g, or t
  misc_feature (1689)..(1689): n is a, c, g, or t
  misc_feature (1692)..(1692): n is a, c, g, or t
  misc_feature (1695)..(1695): n is a, c, g, or t
  misc_feature (1701)..(1701): n is a, c, g, or t
  misc_feature (1704)..(1704): n is a, c, g, or t
  misc_feature (1707)..(1707): n is a, c, g, or t
  misc_feature (1710)..(1710): n is a, c, g, or t
  misc_feature (1713)..(1713): n is a, c, g, or t
  misc_feature (1716)..(1716): n is a, c, g, or t
  misc_feature (1719)..(1719): n is a, c, g, or t
  misc_feature (1722)..(1722): n is a, c, g, or t
  misc_feature (1731)..(1731): n is a, c, g, or t
  misc_feature (1737)..(1737): n is a, c, g, or t
  misc_feature (1740)..(1740): n is a, c, g, or t
  misc_feature (1743)..(1743): n is a, c, g, or t
  misc_feature (1746)..(1746): n is a, c, g, or t
  misc_feature (1749)..(1749): n is a, c, g, or t
  misc_feature (1752)..(1752): n is a, c, g, or t
  misc_feature (1755)..(1755): n is a, c, g, or t
  misc_feature (1758)..(1758): n is a, c, g, or t
  misc_feature (1761)..(1761): n is a, c, g, or t
  misc_feature (1764)..(1764): n is a, c, g, or t
  misc_feature (1767)..(1767): n is a, c, g, or t
  misc_feature (1770)..(1770): n is a, c, g, or t
  misc_feature (1773)..(1773): n is a, c, g, or t
  misc_feature (1776)..(1776): n is a, c, g, or t
  misc_feature (1779)..(1779): n is a, c, g, or t
  misc_feature (1782)..(1782): n is a, c, g, or t
  misc_feature (1785)..(1785): n is a, c, g, or t
  misc_feature (1794)..(1794): n is a, c, g, or t
  misc_feature (1803)..(1803): n is a, c, g, or t
  misc_feature (1809)..(1809): n is a, c, g, or t
  misc_feature (1812)..(1812): n is a, c, g, or t
  misc_feature (1815)..(1815): n is a, c, g, or t
  misc_feature (1818)..(1818): n is a, c, g, or t
  misc_feature (1821)..(1821): n is a, c, g, or t
  misc_feature (1830)..(1830): n is a, c, g, or t
  misc_feature (1833)..(1833): n is a, c, g, or t
  misc_feature (1839)..(1839): n is a, c, g, or t
  misc_feature (1848)..(1848): n is a, c, g, or t
  misc_feature (1854)..(1854): n is a, c, g, or t
  misc_feature (1857)..(1857): n is a, c, g, or t
  misc_feature (1860)..(1860): n is a, c, g, or t
  misc_feature (1863)..(1863): n is a, c, g, or t
  misc_feature (1866)..(1866): n is a, c, g, or t
  misc_feature (1872)..(1872): n is a, c, g, or t
  misc_feature (1875)..(1875): n is a, c, g, or t
  misc_feature (1881)..(1881): n is a, c, g, or t
  misc_feature (1884)..(1884): n is a, c, g, or t
  misc_feature (1887)..(1887): n is a, c, g, or t
  misc_feature (1890)..(1890): n is a, c, g, or t
  misc_feature (1893)..(1893): n is a, c, g, or t
  misc_feature (1899)..(1899): n is a, c, g, or t
  misc_feature (1902)..(1902): n is a, c, g, or t
  misc_feature (1905)..(1905): n is a, c, g, or t
  misc_feature (1908)..(1908): n is a, c, g, or t
  misc_feature (1911)..(1911): n is a, c, g, or t
  misc_feature (1914)..(1914): n is a, c, g, or t
  misc_feature (1920)..(1920): n is a, c, g, or t
  misc_feature (1923)..(1923): n is a, c, g, or t
  misc_feature (1929)..(1929): n is a, c, g, or t
  misc_feature (1932)..(1932): n is a, c, g, or t
  misc_feature (1935)..(1935): n is a, c, g, or t
  misc_feature (1938)..(1938): n is a, c, g, or t
  misc_feature (1941)..(1941): n is a, c, g, or t
  misc_feature (1944)..(1944): n is a, c, g, or t
  misc_feature (1947)..(1947): n is a, c, g, or t
  misc_feature (1950)..(1950): n is a, c, g, or t
  misc_feature (1956)..(1956): n is a, c, g, or t
  misc_feature (1965)..(1965): n is a, c, g, or t
  misc_feature (1974)..(1974): n is a, c, g, or t
  misc_feature (1977)..(1977): n is a, c, g, or t
  misc_feature (1980)..(1980): n is a, c, g, or t
  misc_feature (1983)..(1983): n is a, c, g, or t
  misc_feature (1989)..(1989): n is a, c, g, or t
  misc_feature (1992)..(1992): n is a, c, g, or t
  misc_feature (1995)..(1995): n is a, c, g, or t
  misc_feature (2001)..(2001): n is a, c, g, or t
  misc_feature (2004)..(2004): n is a, c, g, or t
  misc_feature (2007)..(2007): n is a, c, g, or t
  misc_feature (2010)..(2010): n is a, c, g, or t
  misc_feature (2013)..(2013): n is a, c, g, or t
  misc_feature (2019)..(2019): n is a, c, g, or t
  misc_feature (2022)..(2022): n is a, c, g, or t
  misc_feature (2025)..(2025): n is a, c, g, or t
  misc_feature (2028)..(2028): n is a, c, g, or t
  misc_feature (2031)..(2031): n is a, c, g, or t
  misc_feature (2034)..(2034): n is a, c, g, or t
  misc_feature (2037)..(2037): n is a, c, g, or t
  misc_feature (2046)..(2046): n is a, c, g, or t
  misc_feature (2052)..(2052): n is a, c, g, or t
  misc_feature (2055)..(2055): n is a, c, g, or t
  misc_feature (2061)..(2061): n is a, c, g, or t
  misc_feature (2064)..(2064): n is a, c, g, or t
  misc_feature (2067)..(2067): n is a, c, g, or t
  misc_feature (2073)..(2073): n is a, c, g, or t
  misc_feature (2076)..(2076): n is a, c, g, or t
  misc_feature (2082)..(2082): n is a, c, g, or t
  misc_feature (2085)..(2085): n is a, c, g, or t
  misc_feature (2088)..(2088): n is a, c, g, or t
  misc_feature (2091)..(2091): n is a, c, g, or t
  misc_feature (2094)..(2094): n is a, c, g, or t
  misc_feature (2097)..(2097): n is a, c, g, or t
  misc_feature (2100)..(2100): n is a, c, g, or t
  misc_feature (2103)..(2103): n is a, c, g, or t
  misc_feature (2109)..(2109): n is a, c, g, or t
  misc_feature (2112)..(2112): n is a, c, g, or t
  misc_feature (2115)..(2115): n is a, c, g, or t
  misc_feature (2118)..(2118): n is a, c, g, or t
  misc_feature (2121)..(2121): n is a, c, g, or t
  misc_feature (2127)..(2127): n is a, c, g, or t
  misc_feature (2130)..(2130): n is a, c, g, or t
  misc_feature (2133)..(2133): n is a, c, g, or t
  misc_feature (2136)..(2136): n is a, c, g, or t
  misc_feature (2139)..(2139): n is a, c, g, or t
  misc_feature (2142)..(2142): n is a, c, g, or t
  misc_feature (2145)..(2145): n is a, c, g, or t
  misc_feature (2148)..(2148): n is a, c, g, or t
  misc_feature (2151)..(2151): n is a, c, g, or t
  misc_feature (2154)..(2154): n is a, c, g, or t
  misc_feature (2160)..(2160): n is a, c, g, or t
  misc_feature (2163)..(2163): n is a, c, g, or t
  misc_feature (2166)..(2166): n is a, c, g, or t
  misc_feature (2169)..(2169): n is a, c, g, or t
  misc_feature (2172)..(2172): n is a, c, g, or t
  misc_feature (2181)..(2181): n is a, c, g, or t
  misc_feature (2187)..(2187): n is a, c, g, or t
  misc_feature (2190)..(2190): n is a, c, g, or t
  misc_feature (2196)..(2196): n is a, c, g, or t
  misc_feature (2199)..(2199): n is a, c, g, or t
  misc_feature (2205)..(2205): n is a, c, g, or t
  misc_feature (2208)..(2208): n is a, c, g, or t
  misc_feature (2211)..(2211): n is a, c, g, or t
  misc_feature (2214)..(2214): n is a, c, g, or t
  misc_feature (2217)..(2217): n is a, c, g, or t
  misc_feature (2220)..(2220): n is a, c, g, or t
  misc_feature (2223)..(2223): n is a, c, g, or t
  misc_feature (2226)..(2226): n is a, c, g, or t
  misc_feature (2232)..(2232): n is a, c, g, or t
  misc_feature (2235)..(2235): n is a, c, g, or t
  misc_feature (2238)..(2238): n is a, c, g, or t
  misc_feature (2244)..(2244): n is a, c, g, or t
  misc_feature (2253)..(2253): n is a, c, g, or t
  misc_feature (2262)..(2262): n is a, c, g, or t
  misc_feature (2268)..(2268): n is a, c, g, or t
  misc_feature (2271)..(2271): n is a, c, g, or t
  misc_feature (2274)..(2274): n is a, c, g, or t
  misc_feature (2277)..(2277): n is a, c, g, or t
  misc_feature (2280)..(2280): n is a, c, g, or t
  misc_feature (2283)..(2283): n is a, c, g, or t
  misc_feature (2286)..(2286): n is a, c, g, or t
  misc_feature (2289)..(2289): n is a, c, g, or t
  misc_feature (2292)..(2292): n is a, c, g, or t
  misc_feature (2295)..(2295): n is a, c, g, or t
  misc_feature (2298)..(2298): n is a, c, g, or t
  misc_feature (2307)..(2307): n is a, c, g, or t
  misc_feature (2310)..(2310): n is a, c, g, or t
  misc_feature (2313)..(2313): n is a, c, g, or t
  misc_feature (2316)..(2316): n is a, c, g, or t
  misc_feature (2325)..(2325): n is a, c, g, or t
  misc_feature (2328)..(2328): n is a, c, g, or t
  misc_feature (2334)..(2334): n is a, c, g, or t
  misc_feature (2337)..(2337): n is a, c, g, or t
  misc_feature (2340)..(2340): n is a, c, g, or t
  misc_feature (2343)..(2343): n is a, c, g, or t
  misc_feature (2346)..(2346): n is a, c, g, or t
  misc_feature (2349)..(2349): n is a, c, g, or t
  misc_feature (2352)..(2352): n is a, c, g, or t
  misc_feature (2355)..(2355): n is a, c, g, or t
  misc_feature (2358)..(2358): n is a, c, g, or t
  misc_feature (2361)..(2361): n is a, c, g, or t
  misc_feature (2367)..(2367): n is a, c, g, or t
  misc_feature (2370)..(2370): n is a, c, g, or t
  misc_feature (2373)..(2373): n is a, c, g, or t
  misc_feature (2376)..(2376): n is a, c, g, or t
  misc_feature (2379)..(2379): n is a, c, g, or t
  misc_feature (2385)..(2385): n is a, c, g, or t
  misc_feature (2388)..(2388): n is a, c, g, or t
  misc_feature (2391)..(2391): n is a, c, g, or t
  misc_feature (2394)..(2394): n is a, c, g, or t
  misc_feature (2397)..(2397): n is a, c, g, or t
  misc_feature (2406)..(2406): n is a, c, g, or t
  misc_feature (2409)..(2409): n is a, c, g, or t
  misc_feature (2412)..(2412): n is a, c, g, or t
  misc_feature (2415)..(2415): n is a, c, g, or t
  misc_feature (2424)..(2424): n is a, c, g, or t
  misc_feature (2430)..(2430): n is a, c, g, or t
  misc_feature (2433)..(2433): n is a, c, g, or t
  misc_feature (2439)..(2439): n is a, c, g, or t
  misc_feature (2442)..(2442): n is a, c, g, or t
  misc_feature (2445)..(2445): n is a, c, g, or t
  misc_feature (2448)..(2448): n is a, c, g, or t
  misc_feature (2451)..(2451): n is a, c, g, or t
  misc_feature (2454)..(2454): n is a, c, g, or t
  misc_feature (2457)..(2457): n is a, c, g, or t
  misc_feature (2460)..(2460): n is a, c, g, or t
  misc_feature (2463)..(2463): n is a, c, g, or t
  misc_feature (2466)..(2466): n is a, c, g, or t
  misc_feature (2469)..(2469): n is a, c, g, or t
  misc_feature (2475)..(2475): n is a, c, g, or t
  misc_feature (2478)..(2478): n is a, c, g, or t
  misc_feature (2481)..(2481): n is a, c, g, or t
  misc_feature (2484)..(2484): n is a, c, g, or t
  misc_feature (2487)..(2487): n is a, c, g, or t
  misc_feature (2490)..(2490): n is a, c, g, or t
  misc_feature (2493)..(2493): n is a, c, g, or t
  misc_feature (2496)..(2496): n is a, c, g, or t
  misc_feature (2502)..(2502): n is a, c, g, or t
  misc_feature (2505)..(2505): n is a, c, g, or t
  misc_feature (2508)..(2508): n is a, c, g, or t
  misc_feature (2511)..(2511): n is a, c, g, or t
  misc_feature (2514)..(2514): n is a, c, g, or t
  misc_feature (2523)..(2523): n is a, c, g, or t
  misc_feature (2526)..(2526): n is a, c, g, or t
  misc_feature (2532)..(2532): n is a, c, g, or t
  misc_feature (2535)..(2535): n is a, c, g, or t
  misc_feature (2541)..(2541): n is a, c, g, or t
  misc_feature (2550)..(2550): n is a, c, g, or t
  misc_feature (2553)..(2553): n is a, c, g, or t
  misc_feature (2559)..(2559): n is a, c, g, or t
  misc_feature (2565)..(2565): n is a, c, g, or t
  misc_feature (2568)..(2568): n is a, c, g, or t
  misc_feature (2571)..(2571): n is a, c, g, or t
  misc_feature (2577)..(2577): n is a, c, g, or t
  misc_feature (2580)..(2580): n is a, c, g, or t
  misc_feature (2583)..(2583): n is a, c, g, or t
  misc_feature (2586)..(2586): n is a, c, g, or t
  misc_feature (2589)..(2589): n is a, c, g, or t
  misc_feature (2592)..(2592): n is a, c, g, or t
  misc_feature (2595)..(2595): n is a, c, g, or t
  misc_feature (2598)..(2598): n is a, c, g, or t
  misc_feature (2604)..(2604): n is a, c, g, or t
  misc_feature (2607)..(2607): n is a, c, g, or t
  misc_feature (2610)..(2610): n is a, c, g, or t
  misc_feature (2613)..(2613): n is a, c, g, or t
  misc_feature (2616)..(2616): n is a, c, g, or t
  misc_feature (2619)..(2619): n is a, c, g, or t
  misc_feature (2622)..(2622): n is a, c, g, or t
  misc_feature (2625)..(2625): n is a, c, g, or t
  misc_feature (2628)..(2628): n is a, c, g, or t
  misc_feature (2631)..(2631): n is a, c, g, or t
  misc_feature (2634)..(2634): n is a, c, g, or t
  misc_feature (2640)..(2640): n is a, c, g, or t
  misc_feature (2643)..(2643): n is a, c, g, or t
  misc_feature (2646)..(2646): n is a, c, g, or t
  misc_feature (2649)..(2649): n is a, c, g, or t
  misc_feature (2655)..(2655): n is a, c, g, or t
  misc_feature (2658)..(2658): n is a, c, g, or t
  misc_feature (2661)..(2661): n is a, c, g, or t
  misc_feature (2664)..(2664): n is a, c, g, or t
  misc_feature (2667)..(2667): n is a, c, g, or t
  misc_feature (2673)..(2673): n is a, c, g, or t
  misc_feature (2676)..(2676): n is a, c, g, or t
  misc_feature (2679)..(2679): n is a, c, g, or t
  misc_feature (2682)..(2682): n is a, c, g, or t
  misc_feature (2685)..(2685): n is a, c, g, or t
  misc_feature (2688)..(2688): n is a, c, g, or t
  misc_feature (2691)..(2691): n is a, c, g, or t
  misc_feature (2694)..(2694): n is a, c, g, or t
  misc_feature (2703)..(2703): n is a, c, g, or t
  misc_feature (2706)..(2706): n is a, c, g, or t
  misc_feature (2709)..(2709): n is a, c, g, or t
  misc_feature (2712)..(2712): n is a, c, g, or t
  misc_feature (2715)..(2715): n is a, c, g, or t
  misc_feature (2718)..(2718): n is a, c, g, or t
  misc_feature (2721)..(2721): n is a, c, g, or t
  misc_feature (2724)..(2724): n is a, c, g, or t
  misc_feature (2727)..(2727): n is a, c, g, or t
  misc_feature (2730)..(2730): n is a, c, g, or t
  misc_feature (2733)..(2733): n is a, c, g, or t
  misc_feature (2736)..(2736): n is a, c, g, or t
  misc_feature (2739)..(2739): n is a, c, g, or t
  misc_feature (2742)..(2742): n is a, c, g, or t
  misc_feature (2748)..(2748): n is a, c, g, or t
  misc_feature (2754)..(2754): n is a, c, g, or t
  misc_feature (2757)..(2757): n is a, c, g, or t
  misc_feature (2760)..(2760): n is a, c, g, or t
  misc_feature (2766)..(2766): n is a, c, g, or t
  misc_feature (2775)..(2775): n is a, c, g, or t
  misc_feature (2784)..(2784): n is a, c, g, or t
  misc_feature (2787)..(2787): n is a, c, g, or t
  misc_feature (2793)..(2793): n is a, c, g, or t
  misc_feature (2796)..(2796): n is a, c, g, or t
  misc_feature (2802)..(2802): n is a, c, g, or t
  misc_feature (2805)..(2805): n is a, c, g, or t
  misc_feature (2808)..(2808): n is a, c, g, or t
  misc_feature (2811)..(2811): n is a, c, g, or t
  misc_feature (2817)..(2817): n is a, c, g, or t
  misc_feature (2820)..(2820): n is a, c, g, or t
  misc_feature (2829)..(2829): n is a, c, g, or t
  misc_feature (2838)..(2838): n is a, c, g, or t
  misc_feature (2841)..(2841): n is a, c, g, or t
  misc_feature (2844)..(2844): n is a, c, g, or t
  misc_feature (2847)..(2847): n is a, c, g, or t
  misc_feature (2850)..(2850): n is a, c, g, or t
  misc_feature (2856)..(2856): n is a, c, g, or t
  misc_feature (2859)..(2859): n is a, c, g, or t
  misc_feature (2862)..(2862): n is a, c, g, or t
  misc_feature (2865)..(2865): n is a, c, g, or t
  misc_feature (2868)..(2868): n is a, c, g, or t
  misc_feature (2874)..(2874): n is a, c, g, or t
  misc_feature (2880)..(2880): n is a, c, g, or t
  misc_feature (2883)..(2883): n is a, c, g, or t
  misc_feature (2886)..(2886): n is a, c, g, or t
  misc_feature (2889)..(2889): n is a, c, g, or t
  misc_feature (2892)..(2892): n is a, c, g, or t
  misc_feature (2895)..(2895): n is a, c, g, or t
  misc_feature (2901)..(2901): n is a, c, g, or t
  misc_feature (2904)..(2904): n is a, c, g, or t
  misc_feature (2907)..(2907): n is a, c, g, or t
  misc_feature (2910)..(2910): n is a, c, g, or t
  misc_feature (2916)..(2916): n is a, c, g, or t
  misc_feature (2919)..(2919): n is a, c, g, or t
  misc_feature (2922)..(2922): n is a, c, g, or t
  misc_feature (2925)..(2925): n is a, c, g, or t
  misc_feature (2928)..(2928): n is a, c, g, or t
  misc_feature (2931)..(2931): n is a, c, g, or t
  misc_feature (2934)..(2934): n is a, c, g, or t
  misc_feature (2937)..(2937): n is a, c, g, or t
  misc_feature (2940)..(2940): n is a, c, g, or t
  misc_feature (2943)..(2943): n is a, c, g, or t
  misc_feature (2946)..(2946): n is a, c, g, or t
  misc_feature (2955)..(2955): n is a, c, g, or t
  misc_feature (2958)..(2958): n is a, c, g, or t
  misc_feature (2964)..(2964): n is a, c, g, or t
  misc_feature (2967)..(2967): n is a, c, g, or t
  misc_feature (2970)..(2970): n is a, c, g, or t
  misc_feature (2973)..(2973): n is a, c, g, or t
  misc_feature (2976)..(2976): n is a, c, g, or t
  misc_feature (2982)..(2982): n is a, c, g, or t
  misc_feature (2985)..(2985): n is a, c, g, or t
  misc_feature (2988)..(2988): n is a, c, g, or t
  misc_feature (2991)..(2991): n is a, c, g, or t
  misc_feature (2997)..(2997): n is a, c, g, or t
  misc_feature (3000)..(3000): n is a, c, g, or t
  misc_feature (3003)..(3003): n is a, c, g, or t
  misc_feature (3006)..(3006): n is a, c, g, or t
  misc_feature (3009)..(3009): n is a, c, g, or t
  misc_feature (3012)..(3012): n is a, c, g, or t
  misc_feature (3015)..(3015): n is a, c, g, or t
  misc_feature (3018)..(3018): n is a, c, g, or t
  misc_feature (3021)..(3021): n is a, c, g, or t
  misc_feature (3024)..(3024): n is a, c, g, or t
  misc_feature (3027)..(3027): n is a, c, g, or t
  misc_feature (3030)..(3030): n is a, c, g, or t
  misc_feature (3033)..(3033): n is a, c, g, or t
ggnccnccnggnccngtnggnytnacnggnmgnccnggnccngtnggnytnccnggncayccnggnytnaarggngargarggngcngarggnccncarggnccnmgnggnytncarggnccncayggnccnccnggnmgngtnggnaaratgggnmgnccnggngcngayggngcnmgnggnytnccnggngayacnggnccnaarggngaymgnggnttygayggnytnccnggnytnccnggngaraarggncarmgnggngayttyggncaygtnggncarccnggnccnccnggngargayggngarmgnggngcngarggnccnccnggnccnacnggncargcnggngarccnggnccnmgnggnytnytnggnccnmgnggnwsnccnggnccnacnggnmgnccnggngtnacnggnathgayggngcnccnggngcnaarggnaaygtnggnccnccnggngarccnggnccnccnggncarcarggnaaycayggnwsncarggnytnccnggnccncarggnytnathggnacnccnggngaraarggnccnccnggnaayccnggnathccnggnytnccnggnwsngayggnccnytnggncayccnggncaygarggnccnacnggngaraarggngcncarggnccnccnggnwsngcnggnccnccnggntayccnggnccnmgnggngtnaarggnacnwsnggnaaymgnggnytncarggngaraarggngaraarggngargayggnttyccnggnttyaarggngaygtnggnytnaarggngaycarggnaarccnggngcnccnggnccnmgnggngargayggnccngarggnccnaarggncargcnggncargcnggngargarggnccnccnggnwsngcnggngaraarggnaarytnggngtnccnggnytnccnggntayccnggnmgnccnggnccnaarggnwsnathggnttyccnggnccnytnggnccnathggngaraarggnaarwsnggnaaracnggncarccnggnytngarggngarmgnggnccnccnggnwsnmgnggngarmgnggncarccnggngcnacnggncarccnggnccnaarggngaygtnggncargayggngcnccnggnathccnggngaraarggnytnccnggnytncarggnccnccnggnttyccnggnccnaarggnccnccnggncaycarggnaargayggnmgnccnggncayccnggncarmgnggngarytnggnttycarggncaracnggnccnccnggnccngcnggngtnytnggnccncarggnaaracnggngargtnggnccnytnggngarmgnggnccnccnggnccnccnggnccnccnggngarcarggnytnccnggnytngarggnmgngarggngcnaarggngarytnggnccnccnggnccnytnggnaargarggnccngcnggnytnmgnggnttyccnggnccnaarggnggnccnggngayccnggnccnacnggnytnaarggngayaarggnccnccnggnccngtnggngcnaayggnwsnccnggngarmgnggnccnytnggnccngcnggnggnathggnytnccnggncarwsnggnwsngarggnccngtnggnccngcnggnaaraarggnwsnmgnggngarmgnggnccnccnggnccnacnggnaargayggnathccnggnccnytnggnccnytnggnccnccnggngcngcnggnccnwsnggngargarggngayaarggngaygtnggngcnccnggncayaarggnwsnaarggngayaarggngaygcnggnccnccnggncarccnggnathmgnggnccngcnggncayccnggnccnccnggngcngayggngcncarggnmgnmgnggnccnccnggnytnttyggncaraarggngaygayggngtnmgnggnttygtnggngtnathggnccnccnggnytncarggnytnccnggnccnccnggngaraarggngargtnggngaygtnggnwsnatgggnccncayggngcnccnggnccnmgnggnccncarggnccnacnggnwsngarggnacnccnggnytnccnggnggngtnggncarccnggngcngtnggngaraarggngarmgnggngaygcnggngayccnggnccnccnggngcnccnggnathccnggnccnaarggngayathggngaraarggngaywsnggnccnwsnggngcngcnggnccnccnggnaaraarggnccnccnggngargayggngcnaarggnwsngtnggnccnacnggnytnccnggngayytnggnccnccnggngayccnggngtnwsnggnathgayggnwsnccnggngaraarggngayccnggngaygtnggnggnccnggnccnccnggngcnwsnggngarccnggngcnccnggnccnccnggnaarmgnggnccnwsnggncayatgggnmgngarggnmgngarggngaraarggngcnaarggngarccnggnccngayggnccnccnggnmgnacnggnccnatgggngcnmgnggnccnccnggnmgngtnggnccngarggnytnmgnggnathccnggnccngtnggngarccnggnytnytnggngcnccnggncaratgggnccnccnggnccnytnggnccnwsnggnytnccnggnytnaarggngayacnggnccnaarggngaraarggncayathggnytnathggnytnathggnccnccnggngargcnggngaraarggngaycarggnytnccnggngtncarggnccnccnggnccnaarggngayccnggnccnccnggnccnathggnwsnytnggncayccnggnccnccnggngtngcnggnccnytnggncaraarggnwsnaarggnwsnccnggnwsnatgggnccnmgnggngayacnggnccngcnggnccnccnggnccnccnggngcnccn

SEQ ID NO: 1109 - DNA, 1008 bp, Artificial Sequence
  hCol-CNA14 (alpha1(VI) THD)
  misc_feature (3)..(3): n is a, c, g, or t
  misc_feature (6)..(6): n is a, c, g, or t
  misc_feature (9)..(9): n is a, c, g, or t
  misc_feature (12)..(12): n is a, c, g, or t
  misc_feature (15)..(15): n is a, c, g, or t
  misc_feature (18)..(18): n is a, c, g, or t
  misc_feature (21)..(21): n is a, c, g, or t
  misc_feature (27)..(27): n is a, c, g, or t
  misc_feature (30)..(30): n is a, c, g, or t
  misc_feature (39)..(39): n is a, c, g, or t
  misc_feature (45)..(45): n is a, c, g, or t
  misc_feature (48)..(48): n is a, c, g, or t
  misc_feature (54)..(54): n is a, c, g, or t
  misc_feature (57)..(57): n is a, c, g, or t
  misc_feature (60)..(60): n is a, c, g, or t
  misc_feature (63)..(63): n is a, c, g, or t
  misc_feature (66)..(66): n is a, c, g, or t
  misc_feature (75)..(75): n is a, c, g, or t
  misc_feature (81)..(81): n is a, c, g, or t
  misc_feature (84)..(84): n is a, c, g, or t
  misc_feature (90)..(90): n is a, c, g, or t
  misc_feature (93)..(93): n is a, c, g, or t
  misc_feature (96)..(96): n is a, c, g, or t
  misc_feature (99)..(99): n is a, c, g, or t
  misc_feature (102)..(102): n is a, c, g, or t
  misc_feature (108)..(108): n is a, c, g, or t
  misc_feature (111)..(111): n is a, c, g, or t
  misc_feature (114)..(114): n is a, c, g, or t
  misc_feature (117)..(117): n is a, c, g, or t
  misc_feature (120)..(120): n is a, c, g, or t
  misc_feature (129)..(129): n is a, c, g, or t
  misc_feature (138)..(138): n is a, c, g, or t
  misc_feature (147)..(147): n is a, c, g, or t
  misc_feature (150)..(150): n is a, c, g, or t
  misc_feature (153)..(153): n is a, c, g, or t
  misc_feature (156)..(156): n is a, c, g, or t
  misc_feature (165)..(165): n is a, c, g, or t
  misc_feature (168)..(168): n is a, c, g, or t
  misc_feature (171)..(171): n is a, c, g, or t
  misc_feature (174)..(174): n is a, c, g, or t
  misc_feature (177)..(177): n is a, c, g, or t
  misc_feature (183)..(183): n is a, c, g, or t
  misc_feature (192)..(192): n is a, c, g, or t
  misc_feature (201)..(201): n is a, c, g, or t
  misc_feature (207)..(207): n is a, c, g, or t
  misc_feature (210)..(210): n is a, c, g, or t
  misc_feature (219)..(219): n is a, c, g, or t
  misc_feature (222)..(222): n is a, c, g, or t
  misc_feature (228)..(228): n is a, c, g, or t
  misc_feature (231)..(231): n is a, c, g, or t
  misc_feature (237)..(237): n is a, c, g, or t
  misc_feature (246)..(246): n is a, c, g, or t
  misc_feature (252)..(252): n is a, c, g, or t
  misc_feature (255)..(255): n is a, c, g, or t
  misc_feature (258)..(258): n is a, c, g, or t
  misc_feature (261)..(261): n is a, c, g, or t
  misc_feature (264)..(264): n is a, c, g, or t
  misc_feature (273)..(273): n is a, c, g, or t
  misc_feature (276)..(276): n is a, c, g, or t
  misc_feature (279)..(279): n is a, c, g, or t
  misc_feature (282)..(282): n is a, c, g, or t
  misc_feature (291)..(291): n is a, c, g, or t
  misc_feature (300)..(300): n is a, c, g, or t
  misc_feature (303)..(303): n is a, c, g, or t
  misc_feature (306)..(306): n is a, c, g, or t
  misc_feature (309)..(309): n is a, c, g, or t
  misc_feature (312)..(312): n is a, c, g, or t
  misc_feature (318)..(318): n is a, c, g, or t
  misc_feature (324)..(324): n is a, c, g, or t
  misc_feature (327)..(327): n is a, c, g, or t
  misc_feature (330)..(330): n is a, c, g, or t
  misc_feature (336)..(336): n is a, c, g, or t
  misc_feature (339)..(339): n is a, c, g, or t
  misc_feature (345)..(345): n is a, c, g, or t
  misc_feature (354)..(354): n is a, c, g, or t
  misc_feature (360)..(360): n is a, c, g, or t
  misc_feature (363)..(363): n is a, c, g, or t
  misc_feature (366)..(366): n is a, c, g, or t
  misc_feature (372)..(372): n is a, c, g, or t
  misc_feature (378)..(378): n is a, c, g, or t
  misc_feature (381)..(381): n is a, c, g, or t
  misc_feature (384)..(384): n is a, c, g, or t
  misc_feature (387)..(387): n is a, c, g, or t
  misc_feature (390)..(390): n is a, c, g, or t
  misc_feature (393)..(393): n is a, c, g, or t
  misc_feature (396)..(396): n is a, c, g, or t
  misc_feature (399)..(399): n is a, c, g, or t
  misc_feature (402)..(402): n is a, c, g, or t
  misc_feature (405)..(405): n is a, c, g, or t
  misc_feature (408)..(408): n is a, c, g, or t
  misc_feature (417)..(417): n is a, c, g, or t
  misc_feature (423)..(423): n is a, c, g, or t
  misc_feature (426)..(426): n is a, c, g, or t
  misc_feature (432)..(432): n is a, c, g, or t
  misc_feature (435)..(435): n is a, c, g, or t
  misc_feature (438)..(438): n is a, c, g, or t
  misc_feature (441)..(441): n is a, c, g, or t
  misc_feature (444)..(444): n is a, c, g, or t
  misc_feature (453)..(453): n is a, c, g, or t
  misc_feature (459)..(459): n is a, c, g, or t
  misc_feature (462)..(462): n is a, c, g, or t
  misc_feature (471)..(471): n is a, c, g, or t
  misc_feature (477)..(477): n is a, c, g, or t
  misc_feature (480)..(480): n is a, c, g, or t
  misc_feature (483)..(483): n is a, c, g, or t
  misc_feature (489)..(489): n is a, c, g, or t
  misc_feature (492)..(492): n is a, c, g, or t
  misc_feature (495)..(495): n is a, c, g, or t
  misc_feature (498)..(498): n is a, c, g, or t
  misc_feature (504)..(504): n is a, c, g, or t
  misc_feature (507)..(507): n is a, c, g, or t
  misc_feature (510)..(510): n is a, c, g, or t
  misc_feature (513)..(513): n is a, c, g, or t
  misc_feature (516)..(516): n is a, c, g, or t
  misc_feature (522)..(522): n is a, c, g, or t
  misc_feature (525)..(525): n is a, c, g, or t
  misc_feature (528)..(528): n is a, c, g, or t
  misc_feature (531)..(531): n is a, c, g, or t
  misc_feature (534)..(534): n is a, c, g, or t
  misc_feature (537)..(537): n is a, c, g, or t
  misc_feature (540)..(540): n is a, c, g, or t
  misc_feature (543)..(543): n is a, c, g, or t
  misc_feature (546)..(546): n is a, c, g, or t
  misc_feature (549)..(549): n is a, c, g, or t
  misc_feature (552)..(552): n is a, c, g, or t
  misc_feature (555)..(555): n is a, c, g, or t
  misc_feature (558)..(558): n is a, c, g, or t
  misc_feature (561)..(561): n is a, c, g, or t
  misc_feature (567)..(567): n is a, c, g, or t
  misc_feature (570)..(570): n is a, c, g, or t
  misc_feature (576)..(576): n is a, c, g, or t
  misc_feature (579)..(579): n is a, c, g, or t
  misc_feature (582)..(582): n is a, c, g, or t
  misc_feature (588)..(588): n is a, c, g, or t
  misc_feature (597)..(597): n is a, c, g, or t
  misc_feature (600)..(600): n is a, c, g, or t
  misc_feature (606)..(606): n is a, c, g, or t
  misc_feature (609)..(609): n is a, c, g, or t
  misc_feature (612)..(612): n is a, c, g, or t
  misc_feature (615)..(615): n is a, c, g, or t
  misc_feature (618)..(618): n is a, c, g, or t
  misc_feature (621)..(621): n is a, c, g, or t
  misc_feature (624)..(624): n is a, c, g, or t
  misc_feature (630)..(630): n is a, c, g, or t
  misc_feature (633)..(633): n is a, c, g, or t
  misc_feature (639)..(639): n is a, c, g, or t
  misc_feature (642)..(642): n is a, c, g, or t
  misc_feature (645)..(645): n is a, c, g, or t
  misc_feature (651)..(651): n is a, c, g, or t
  misc_feature (654)..(654): n is a, c, g, or t
  misc_feature (660)..(660): n is a, c, g, or t
  misc_feature (666)..(666): n is a, c, g, or t
  misc_feature (669)..(669): n is a, c, g, or t
  misc_feature (678)..(678): n is a, c, g, or t
  misc_feature (681)..(681): n is a, c, g, or t
  misc_feature (684)..(684): n is a, c, g, or t
  misc_feature (687)..(687): n is a, c, g, or t
  misc_feature (690)..(690): n is a, c, g, or t
  misc_feature (696)..(696): n is a, c, g, or t
  misc_feature (699)..(699): n is a, c, g, or t
  misc_feature (702)..(702): n is a, c, g, or t
  misc_feature (705)..(705): n is a, c, g, or t
  misc_feature (708)..(708): n is a, c, g, or t
  misc_feature (711)..(711): n is a, c, g, or t
  misc_feature (714)..(714): n is a, c, g, or t
  misc_feature (717)..(717): n is a, c, g, or t
  misc_feature (720)..(720): n is a, c, g, or t
  misc_feature (723)..(723): n is a, c, g, or t
  misc_feature (726)..(726): n is a, c, g, or t
  misc_feature (729)..(729): n is a, c, g, or t
  misc_feature (732)..(732): n is a, c, g, or t
  misc_feature (738)..(738): n is a, c, g, or t
  misc_feature (741)..(741): n is a, c, g, or t
  misc_feature (744)..(744): n is a, c, g, or t
  misc_feature (750)..(750): n is a, c, g, or t
  misc_feature (756)..(756): n is a, c, g, or t
  misc_feature (759)..(759): n is a, c, g, or t
  misc_feature (768)..(768): n is a, c, g, or t
  misc_feature (771)..(771): n is a, c, g, or t
  misc_feature (774)..(774): n is a, c, g, or t
  misc_feature (777)..(777): n is a, c, g, or t
  misc_feature (783)..(783): n is a, c, g, or t
  misc_feature (786)..(786): n is a, c, g, or t
  misc_feature (792)..(792): n is a, c, g, or t
  misc_feature (798)..(798): n is a, c, g, or t
  misc_feature (801)..(801): n is a, c, g, or t
  misc_feature (807)..(807): n is a, c, g, or t
  misc_feature (810)..(810): n is a, c, g, or t
  misc_feature (816)..(816): n is a, c, g, or t
  misc_feature (819)..(819): n is a, c, g, or t
  misc_feature (825)..(825): n is a, c, g, or t
  misc_feature (828)..(828): n is a, c, g, or t
  misc_feature (831)..(831): n is a, c, g, or t
  misc_feature (834)..(834): n is a, c, g, or t
  misc_feature (837)..(837): n is a, c, g, or t
  misc_feature (846)..(846): n is a, c, g, or t
  misc_feature (849)..(849): n is a, c, g, or t
  misc_feature (855)..(855): n is a, c, g, or t
  misc_feature (861)..(861): n is a, c, g, or t
  misc_feature (864)..(864): n is a, c, g, or t
  misc_feature (867)..(867): n is a, c, g, or t
  misc_feature (873)..(873): n is a, c, g, or t
  misc_feature (882)..(882): n is a, c, g, or t
  misc_feature (888)..(888): n is a, c, g, or t
  misc_feature (891)..(891): n is a, c, g, or t
  misc_feature (897)..(897): n is a, c, g, or t
  misc_feature (900)..(900): n is a, c, g, or t
  misc_feature (921)..(921): n is a, c, g, or t
  misc_feature (924)..(924): n is a, c, g, or t
  misc_feature (927)..(927): n is a, c, g, or t
  misc_feature (930)..(930): n is a, c, g, or t
  misc_feature (933)..(933): n is a, c, g, or t
  misc_feature (939)..(939): n is a, c, g, or t
  misc_feature (942)..(942): n is a, c, g, or t
  misc_feature (948)..(948): n is a, c, g, or t
  misc_feature (954)..(954): n is a, c, g, or t
  misc_feature (957)..(957): n is a, c, g, or t
  misc_feature (960)..(960): n is a, c, g, or t
  misc_feature (966)..(966): n is a, c, g, or t
  misc_feature (969)..(969): n is a, c, g, or t
  misc_feature (975)..(975): n is a, c, g, or t
  misc_feature (978)..(978): n is a, c, g, or t
  misc_feature (981)..(981): n is a, c, g, or t
  misc_feature (984)..(984): n is a, c, g, or t
  misc_feature (993)..(993): n is a, c, g, or t
  misc_feature (996)..(996): n is a, c, g, or t
  misc_feature (999)..(999): n is a, c, g, or t
  misc_feature (1002)..(1002): n is a, c, g, or t
  misc_feature (1005)..(1005): n is a, c, g, or t
ggnccnccnggnytnmgnggngayccnggnttygarggngarmgnggnaarccnggnytnccnggngaraarggngargcnggngayccnggnmgnccnggngayytnggnccngtnggntaycarggnatgaarggngaraarggnwsnmgnggngaraarggnwsnmgnggnccnaarggntayaarggngaraarggnaarmgnggnathgayggngtngayggngtnaarggngaratgggntayccnggnytnccnggntgyaarggnwsnccnggnttygayggnathcarggnccnccnggnccnaarggngayccnggngcnttyggnytnaarggngaraarggngarccnggngcngayggngargcnggnmgnccnggnwsnwsnggnccnwsnggngaygarggncarccnggngarccnggnccnccnggngaraarggngargcnggngaygarggnaayccnggnccngayggngcnccnggngarmgnggnggnccnggngarmgnggnccnmgnggnacnccnggnacnmgnggnccnmgnggngayccnggngargcnggnccncarggngaycarggnmgngarggnccngtnggngtnccnggngayccnggngargcnggnccnathggnccnaarggntaymgnggngaygarggnccnccnggnwsngarggngcnmgnggngcnccnggnccngcnggnccnccnggngayccnggnytnatgggngarmgnggngargayggnccngcnggnaayggnacngarggnttyccnggnttyccnggntayccnggnaaymgnggngcnccnggnathaayggnacnaarggntayccnggnytnaarggngaygarggngargcnggngayccnggngaygayaayaaygayathgcnccnmgnggngtnaarggngcnaarggntaymgnggnccngarggnccncarggnccnccnggncaycarggnccnccnggnccngay

SEQ ID NO: 1110 - DNA, 1005 bp, Artificial Sequence
  hCol-CNA15 (alpha2(VI) THD)
  misc_feature (3)..(3): n is a, c, g, or t
  misc_feature (6)..(6): n is a, c, g, or t
  misc_feature (9)..(9): n is a, c, g, or t
  misc_feature (12)..(12): n is a, c, g, or t
  misc_feature (15)..(15): n is a, c, g, or t
  misc_feature (21)..(21): n is a, c, g, or t
  misc_feature (27)..(27): n is a, c, g, or t
  misc_feature (30)..(30): n is a, c, g, or t
  misc_feature (39)..(39): n is a, c, g, or t
  misc_feature (42)..(42): n is a, c, g, or t
  misc_feature (48)..(48): n is a, c, g, or t
  misc_feature (57)..(57): n is a, c, g, or t
  misc_feature (63)..(63): n is a, c, g, or t
  misc_feature (66)..(66): n is a, c, g, or t
  misc_feature (72)..(72): n is a, c, g, or t
  misc_feature (75)..(75): n is a, c, g, or t
  misc_feature (84)..(84): n is a, c, g, or t
  misc_feature (87)..(87): n is a, c, g, or t
  misc_feature (93)..(93): n is a, c, g, or t
  misc_feature (99)..(99): n is a, c, g, or t
  misc_feature (102)..(102): n is a, c, g, or t
  misc_feature (111)..(111): n is a, c, g, or t
  misc_feature (114)..(114): n is a, c, g, or t
  misc_feature (120)..(120): n is a, c, g, or t
  misc_feature (126)..(126): n is a, c, g, or t
  misc_feature (129)..(129): n is a, c, g, or t
  misc_feature (132)..(132): n is a, c, g, or t
  misc_feature (138)..(138): n is a, c, g, or t
  misc_feature (141)..(141): n is a, c, g, or t
  misc_feature (144)..(144): n is a, c, g, or t
  misc_feature (147)..(147): n is a, c, g, or t
  misc_feature (156)..(156): n is a, c, g, or t
  misc_feature (165)..(165): n is a, c, g, or t
  misc_feature (174)..(174): n is a, c, g, or t
  misc_feature (177)..(177): n is a, c, g, or t
  misc_feature (183)..(183): n is a, c, g, or t
  misc_feature (186)..(186): n is a, c, g, or t
  misc_feature (192)..(192): n is a, c, g, or t
  misc_feature (195)..(195): n is a, c, g, or t
  misc_feature (198)..(198): n is a, c, g, or t
  misc_feature (201)..(201): n is a, c, g, or t
  misc_feature (204)..(204): n is a, c, g, or t
  misc_feature (207)..(207): n is a, c, g, or t
  misc_feature (210)..(210): n is a, c, g, or t
  misc_feature (219)..(219): n is a, c, g, or t
  misc_feature (222)..(222): n is a, c, g, or t
  misc_feature (228)..(228): n is a, c, g, or t
  misc_feature (237)..(237): n is a, c, g, or t
  misc_feature (243)..(243): n is a, c, g, or t
  misc_feature (246)..(246): n is a, c, g, or t
  misc_feature (249)..(249): n is a, c, g, or t
  misc_feature (255)..(255): n is a, c, g, or t
  misc_feature (258)..(258): n is a, c, g, or t
  misc_feature (261)..(261): n is a, c, g, or t
  misc_feature (264)..(264): n is a, c, g, or t
  misc_feature (273)..(273): n is a, c, g, or t
  misc_feature (279)..(279): n is a, c, g, or t
  misc_feature (282)..(282): n is a, c, g, or t
  misc_feature (288)..(288): n is a, c, g, or t
  misc_feature (291)..(291): n is a, c, g, or t
  misc_feature (294)..(294): n is a, c, g, or t
  misc_feature (300)..(300): n is a, c, g, or t
  misc_feature (306)..(306): n is a, c, g, or t
  misc_feature (309)..(309): n is a, c, g, or t
  misc_feature (315)..(315): n is a, c, g, or t
  misc_feature (318)..(318): n is a, c, g, or t
  misc_feature (321)..(321): n is a, c, g, or t
  misc_feature (324)..(324): n is a, c, g, or t
  misc_feature (327)..(327): n is a, c, g, or t
  misc_feature (333)..(333): n is a, c, g, or t
  misc_feature (336)..(336): n is a, c, g, or t
  misc_feature (345)..(345): n is a, c, g, or t
  misc_feature (348)..(348): n is a, c, g, or t
  misc_feature (354)..(354): n is a, c, g, or t
  misc_feature (360)..(360): n is a, c, g, or t
  misc_feature (363)..(363): n is a, c, g, or t
  misc_feature (366)..(366): n is a, c, g, or t
  misc_feature (369)..(369): n is a, c, g, or t
  misc_feature (372)..(372): n is a, c, g, or t
  misc_feature (375)..(375): n is a, c, g, or t
  misc_feature (378)..(378): n is a, c, g, or t
  misc_feature (381)..(381): n is a, c, g, or t
  misc_feature (384)..(384): n is a, c, g, or t
  misc_feature (387)..(387): n is a, c, g, or t
  misc_feature (390)..(390): n is a, c, g, or t
  misc_feature (399)..(399): n is a, c, g, or t
  misc_feature (402)..(402): n is a, c, g, or t
  misc_feature (408)..(408): n is a, c, g, or t
  misc_feature (411)..(411): n is a, c, g, or t
  misc_feature (417)..(417): n is a, c, g, or t
  misc_feature (426)..(426): n is a, c, g, or t
  misc_feature (432)..(432): n is a, c, g, or t
  misc_feature (435)..(435): n is a, c, g, or t
  misc_feature (438)..(438): n is a, c, g, or t
  misc_feature (441)..(441): n is a, c, g, or t
  misc_feature (444)..(444): n is a, c, g, or t
  misc_feature (447)..(447): n is a, c, g, or t
  misc_feature (450)..(450): n is a, c, g, or t
  misc_feature (453)..(453): n is a, c, g, or t
  misc_feature (456)..(456): n is a, c, g, or t
  misc_feature (462)..(462): n is a, c, g, or t
  misc_feature (465)..(465): n is a, c, g, or t
  misc_feature (471)..(471): n is a, c, g, or t
  misc_feature (474)..(474): n is a, c, g, or t
  misc_feature (477)..(477): n is a, c, g, or t
  misc_feature (480)..(480): n is a, c, g, or t
  misc_feature (483)..(483): n is a, c, g, or t
  misc_feature (486)..(486): n is a, c, g, or t
  misc_feature (489)..(489): n is a, c, g, or t
  misc_feature (492)..(492): n is a, c, g, or t
  misc_feature (498)..(498): n is a, c, g, or t
  misc_feature (504)..(504): n is a, c, g, or t
  misc_feature (507)..(507): n is a, c, g, or t
  misc_feature (510)..(510): n is a, c, g, or t
  misc_feature (513)..(513): n is a, c, g, or t
  misc_feature (516)..(516): n is a, c, g, or t
  misc_feature (522)..(522): n is a, c, g, or t
  misc_feature (525)..(525): n is a, c, g, or t
  misc_feature (528)..(528): n is a, c, g, or t
  misc_feature (534)..(534): n is a, c, g, or t
  misc_feature (537)..(537): n is a, c, g, or t
  misc_feature (540)..(540): n is a, c, g, or t
  misc_feature (543)..(543): n is a, c, g, or t
  misc_feature (546)..(546): n is a, c, g, or t
  misc_feature (552)..(552): n is a, c, g, or t
  misc_feature (555)..(555): n is a, c, g, or t
  misc_feature (561)..(561): n is a, c, g, or t
  misc_feature (570)..(570): n is a, c, g, or t
  misc_feature (576)..(576): n is a, c, g, or t
  misc_feature (579)..(579): n is a, c, g, or t
  misc_feature (582)..(582): n is a, c, g, or t
  misc_feature (588)..(588): n is a, c, g, or t
  misc_feature (591)..(591): n is a, c, g, or t
  misc_feature (594)..(594): n is a, c, g, or t
  misc_feature (597)..(597): n is a, c, g, or t
  misc_feature (600)..(600): n is a, c, g, or t
  misc_feature (603)..(603): n is a, c, g, or t
  misc_feature (606)..(606): n is a, c, g, or t
  misc_feature (612)..(612): n is a, c, g, or t
  misc_feature (615)..(615): n is a, c, g, or t
  misc_feature (624)..(624): n is a, c, g, or t
  misc_feature (627)..(627): n is a, c, g, or t
  misc_feature (633)..(633): n is a, c, g, or t
  misc_feature (639)..(639): n is a, c, g, or t
  misc_feature (642)..(642): n is a, c, g, or t
  misc_feature (645)..(645): n is a, c, g, or t
  misc_feature (648)..(648): n is a, c, g, or t
  misc_feature (651)..(651): n is a, c, g, or t
  misc_feature (654)..(654): n is a, c, g, or t
  misc_feature (657)..(657): n is a, c, g, or t
  misc_feature (660)..(660): n is a, c, g, or t
  misc_feature (663)..(663): n is a, c, g, or t
  misc_feature (669)..(669): n is a, c, g, or t
  misc_feature (672)..(672): n is a, c, g, or t
  misc_feature (675)..(675): n is a, c, g, or t
  misc_feature (678)..(678): n is a, c, g, or t
  misc_feature (684)..(684): n is a, c, g, or t
  misc_feature (687)..(687): n is a, c, g, or t
  misc_feature (696)..(696): n is a, c, g, or t
  misc_feature (699)..(699): n is a, c, g, or t
  misc_feature (702)..(702): n is a, c, g, or t
  misc_feature (705)..(705): n is a, c, g, or t
  misc_feature (711)..(711): n is a, c, g, or t
  misc_feature (714)..(714): n is a, c, g, or t
  misc_feature (720)..(720): n is a, c, g, or t
  misc_feature (723)..(723): n is a, c, g, or t
  misc_feature (726)..(726): n is a, c, g, or t
  misc_feature (729)..(729): n is a, c, g, or t
  misc_feature (732)..(732): n is a, c, g, or t
  misc_feature (738)..(738): n is a, c, g, or t
  misc_feature (741)..(741): n is a, c, g, or t
  misc_feature (747)..(747): n is a, c, g, or t
  misc_feature (750)..(750): n is a, c, g, or t
  misc_feature (753)..(753): n is a, c, g, or t
  misc_feature (759)..(759): n is a, c, g, or t
  misc_feature (765)..(765): n is a, c, g, or t
  misc_feature (768)..(768): n is a, c, g, or t
  misc_feature (771)..(771): n is a, c, g, or t
  misc_feature (774)..(774): n is a, c, g, or t
  misc_feature (777)..(777): n is a, c, g, or t
  misc_feature (783)..(783): n is a, c, g, or t
  misc_feature (789)..(789): n is a, c, g, or t
  misc_feature (792)..(792): n is a, c, g, or t
  misc_feature (795)..(795): n is a, c, g, or t
  misc_feature (798)..(798): n is a, c, g, or t
  misc_feature (801)..(801): n is a, c, g, or t
  misc_feature (804)..(804): n is a, c, g, or t
  misc_feature (807)..(807): n is a, c, g, or t
  misc_feature (810)..(810): n is a, c, g, or t
  misc_feature (819)..(819): n is a, c, g, or t
  misc_feature (825)..(825): n is a, c, g, or t
  misc_feature (828)..(828): n is a, c, g, or t
  misc_feature (831)..(831): n is a, c, g, or t
  misc_feature (834)..(834): n is a, c, g, or t
  misc_feature (837)..(837): n is a, c, g, or t
  misc_feature (840)..(840): n is a, c, g, or t
  misc_feature (846)..(846): n is a, c, g, or t
  misc_feature (849)..(849): n is a, c, g, or t
  misc_feature (852)..(852): n is a, c, g, or t
  misc_feature (855)..(855): n is a, c, g, or t
  misc_feature (864)..(864): n is a, c, g, or t
  misc_feature (867)..(867): n is a, c, g, or t
  misc_feature (873)..(873): n is a, c, g, or t
  misc_feature (879)..(879): n is a, c, g, or t
  misc_feature (882)..(882): n is a, c, g, or t
  misc_feature (885)..(885): n is a, c, g, or t
  misc_feature (891)..(891): n is a, c, g, or t
  misc_feature (900)..(900): n is a, c, g, or t
  misc_feature (906)..(906): n is a, c, g, or t
  misc_feature (909)..(909): n is a, c, g, or t
  misc_feature (915)..(915): n is a, c, g, or t
  misc_feature (918)..(918): n is a, c, g, or t
  misc_feature (921)..(921): n is a, c, g, or t
  misc_feature (924)..(924): n is a, c, g, or t
  misc_feature (927)..(927): n is a, c, g, or t
  misc_feature (933)..(933): n is a, c, g, or t
  misc_feature (936)..(936): n is a, c, g, or t
  misc_feature (939)..(939): n is a, c, g, or t
  misc_feature (942)..(942): n is a, c, g, or t
  misc_feature (945)..(945): n is a, c, g, or t
  misc_feature (948)..(948): n is a, c, g, or t
  misc_feature (951)..(951): n is a, c, g, or t
  misc_feature (954)..(954): n is a, c, g, or t
  misc_feature (957)..(957): n is a, c, g, or t
  misc_feature (960)..(960): n is a, c, g, or t
  misc_feature (963)..(963): n is a, c, g, or t
  misc_feature (966)..(966): n is a, c, g, or t
  misc_feature (972)..(972): n is a, c, g, or t
  misc_feature (978)..(978): n is a, c, g, or t
  misc_feature (981)..(981): n is a, c, g, or t
  misc_feature (984)..(984): n is a, c, g, or t
  misc_feature (987)..(987): n is a, c, g, or t
  misc_feature (990)..(990): n is a, c, g, or t
  misc_feature (996)..(996): n is a, c, g, or t
  misc_feature (999)..(999): n is a, c, g, or t
  misc_feature (1002)..(1002): n is a, c, g, or t
  misc_feature (1005)..(1005): n is a, c, g, or t
ggnccnwsnggnccnaarggntaymgnggncaraarggngcnaarggnaayatgggngarccnggngarccnggncaraarggnmgncarggngayccnggnathgarggnccnathggnttyccnggnccnaarggngtnccnggnttyaarggngaraarggngarttyggngcngayggnmgnaarggngcnccnggnytngcnggnaaraayggnacngayggncaraarggnaarytnggnmgnathggnccnccnggntgyaarggngayccnggnaaymgnggnccngayggntayccnggngargcnggnwsnccnggngarmgnggngaycarggnggnaarggngayccnggnmgnccnggnmgnmgnggnccnccnggngarathggngcnaarggnwsnaarggntaycarggnaaywsnggngcnccnggnwsnccnggngtnaarggngcnaarggnggnccnggnccnmgnggnccnaarggngarccnggnmgnmgnggngayccnggnacnaarggnwsnccnggnwsngayggnccnaarggngaraarggngayccnggnccngarggnccnmgnggnytngcnggngargtnggnaayaarggngcnaarggngaymgnggnytnccnggnccnmgnggnccncarggngcnytnggngarccnggnaarcarggnwsnmgnggngayccnggngaygcnggnccnmgnggngaywsnggncarccnggnccnaarggngayccnggnmgnccnggnttywsntayccnggnccnmgnggngcnccnggngaraarggngarccnggnccnmgnggnccngarggnggnmgnggngayttyggnytnaarggngarccnggnmgnaarggngaraarggngarccngcngayccnggnccnccnggngarccnggnccnmgnggnccnmgnggngtnccnggnccngarggngarccnggnccnccnggngayccnggnytnacn

SEQ ID NO: 1111 - DNA, 1008 bp, Artificial Sequence
  hCol-CNA16 (alpha3(VI) THD)
  misc_feature (3)..(3): n is a, c, g, or t
  misc_feature (9)..(9): n is a, c, g, or t
  misc_feature (12)..(12): n is a, c, g, or t
  misc_feature (18)..(18): n is a, c, g, or t
  misc_feature (21)..(21): n is a, c, g, or t
  misc_feature (24)..(24): n is a, c, g, or t
  misc_feature (30)..(30): n is a, c, g, or t
  misc_feature (33)..(33): n is a, c, g, or t
  misc_feature (39)..(39): n is a, c, g, or t
  misc_feature (42)..(42): n is a, c, g, or t
  misc_feature (48)..(48): n is a, c, g, or t
  misc_feature (54)..(54): n is a, c, g, or t
  misc_feature (57)..(57): n is a, c, g, or t
  misc_feature (66)..(66): n is a, c, g, or t
  misc_feature (72)..(72): n is a, c, g, or t
  misc_feature (75)..(75): n is a, c, g, or t
  misc_feature (81)..(81): n is a, c, g, or t
  misc_feature (84)..(84): n is a, c, g, or t
  misc_feature (93)..(93): n is a, c, g, or t
  misc_feature (96)..(96): n is a, c, g, or t
  misc_feature (99)..(99): n is a, c, g, or t
  misc_feature (102)..(102): n is a, c, g, or t
  misc_feature (108)..(108): n is a, c, g, or t
  misc_feature (111)..(111): n is a, c, g, or t
  misc_feature (114)..(114): n is a, c, g, or t
  misc_feature (117)..(117): n is a, c, g, or t
  misc_feature (120)..(120): n is a, c, g, or t
  misc_feature (123)..(123): n is a, c, g, or t
  misc_feature (129)..(129): n is a, c, g, or t
  misc_feature (132)..(132): n is a, c, g, or t
  misc_feature (138)..(138): n is a, c, g, or t
  misc_feature (147)..(147): n is a, c, g, or t
  misc_feature (153)..(153): n is a, c, g, or t
  misc_feature (156)..(156): n is a, c, g, or t
  misc_feature (162)..(162): n is a, c, g, or t
  misc_feature (165)..(165): n is a, c, g, or t
  misc_feature (168)..(168): n is a, c, g, or t
  misc_feature (174)..(174): n is a, c, g, or t
  misc_feature (177)..(177): n is a, c, g, or t
  misc_feature (180)..(180): n is a, c, g, or t
  misc_feature (183)..(183): n is a, c, g, or t
  misc_feature (189)..(189): n is a, c, g, or t
  misc_feature (192)..(192): n is a, c, g, or t
  misc_feature (201)..(201): n is a, c, g, or t
  misc_feature (207)..(207): n is a, c, g, or t
  misc_feature (210)..(210): n is a, c, g, or t
  misc_feature (219)..(219): n is a, c, g, or t
  misc_feature (222)..(222): n is a, c, g, or t
  misc_feature (228)..(228): n is a, c, g, or t
  misc_feature (231)..(231): n is a, c, g, or t
  misc_feature (237)..(237): n is a, c, g, or t
  misc_feature (246)..(246): n is a, c, g, or t
  misc_feature (255)..(255): n is a, c, g, or t
  misc_feature (258)..(258): n is a, c, g, or t
  misc_feature (261)..(261): n is a, c, g, or t
  misc_feature (264)..(264): n is a, c, g, or t
  misc_feature (267)..(267): n is a, c, g, or t
  misc_feature (270)..(270): n is a, c, g, or t
  misc_feature (273)..(273): n is a, c, g, or t
  misc_feature (282)..(282): n is a, c, g, or t
  misc_feature (288)..(288): n is a, c, g, or t
  misc_feature (291)..(291): n is a, c, g, or t
  misc_feature (294)..(294): n is a, c, g, or t
  misc_feature (297)..(297): n is a, c, g, or t
  misc_feature (300)..(300): n is a, c, g, or t
  misc_feature (309)..(309): n is a, c, g, or t
  misc_feature (312)..(312): n is a, c, g, or t
  misc_feature (315)..(315): n is a, c, g, or t
  misc_feature (318)..(318): n is a, c, g, or t
  misc_feature (327)..(327): n is a, c, g, or t
  misc_feature (333)..(333): n is a, c, g, or t
  misc_feature (336)..(336): n is a, c, g, or t
  misc_feature (342)..(342): n is a, c, g, or t
  misc_feature (345)..(345): n is a, c, g, or t
  misc_feature (351)..(351): n is a, c, g, or t
  misc_feature (354)..(354): n is a, c, g, or t
  misc_feature (360)..(360): n is a, c, g, or t
  misc_feature (363)..(363): n is a, c, g, or t
  misc_feature (369)..(369): n is a, c, g, or t
  misc_feature (372)..(372): n is a, c, g, or t
  misc_feature (381)..(381): n is a, c, g, or t
  misc_feature (390)..(390): n is a, c, g, or t
  misc_feature (393)..(393): n is a, c, g, or t
  misc_feature (396)..(396): n is a, c, g, or t
  misc_feature (402)..(402): n is a, c, g, or t
  misc_feature (408)..(408): n is a, c, g, or t
  misc_feature (411)..(411): n is a, c, g, or t
  misc_feature (417)..(417): n is a, c, g, or t
  misc_feature (420)..(420): n is a, c, g, or t
  misc_feature (423)..(423): n is a, c, g, or t
  misc_feature (429)..(429): n is a, c, g, or t
  misc_feature (432)..(432): n is a, c, g, or t
  misc_feature (435)..(435): n is a, c, g, or t
  misc_feature (438)..(438): n is a, c, g, or t
  misc_feature (441)..(441): n is a, c, g, or t
  misc_feature (447)..(447): n is a, c, g, or t
  misc_feature (450)..(450): n is a, c, g, or t
  misc_feature (453)..(453): n is a, c, g, or t
  misc_feature (456)..(456): n is a, c, g, or t
  misc_feature (459)..(459): n is a, c, g, or t
  misc_feature (462)..(462): n is a, c, g, or t
  misc_feature (465)..(465): n is a, c, g, or t
  misc_feature (471)..(471): n is a, c, g, or t
  misc_feature (474)..(474): n is a, c, g, or t
  misc_feature (483)..(483): n is a, c, g, or t
  misc_feature (486)..(486): n is a, c, g, or t
  misc_feature (492)..(492): n is a, c, g, or t
  misc_feature (495)..(495): n is a, c, g, or t
  misc_feature (498)..(498): n is a, c, g, or t
  misc_feature (501)..(501): n is a, c, g, or t
  misc_feature (504)..(504): n is a, c, g, or t
  misc_feature (507)..(507): n is a, c, g, or t
  misc_feature (510)..(510): n is a, c, g, or t
  misc_feature (513)..(513): n is a, c, g, or t
  misc_feature (519)..(519): n is a, c, g, or t
  misc_feature (528)..(528): n is a, c, g, or t
  misc_feature (531)..(531): n is a, c, g, or t
  misc_feature (534)..(534): n is a, c, g, or t
  misc_feature (537)..(537): n is a, c, g, or t
  misc_feature (543)..(543): n is a, c, g, or t
  misc_feature (546)..(546): n is a, c, g, or t
  misc_feature (555)..(555): n is a, c, g, or t
  misc_feature (564)..(564): n is a, c, g, or t
  misc_feature (567)..(567): n is a, c, g, or t
  misc_feature (570)..(570): n is a, c, g, or t
  misc_feature (573)..(573): n is a, c, g, or t
  misc_feature (576)..(576): n is a, c, g, or t
  misc_feature (582)..(582): n is a, c, g, or t
  misc_feature (585)..(585): n is a, c, g, or t
  misc_feature (588)..(588): n is a, c, g, or t
  misc_feature (591)..(591): n is a, c, g, or t
  misc_feature (594)..(594): n is a, c, g, or t
  misc_feature (597)..(597): n is a, c, g, or t
  misc_feature (600)..(600): n is a, c, g, or t
  misc_feature (603)..(603): n is a, c, g, or t
  misc_feature (606)..(606): n is a, c, g, or t
  misc_feature (609)..(609): n is a, c, g, or t
  misc_feature (612)..(612): n is a, c, g, or t
  misc_feature (618)..(618): n is a, c, g, or t
  misc_feature (627)..(627): n is a, c, g, or t
  misc_feature (633)..(633): n is a, c, g, or t
  misc_feature (636)..(636): n is a, c, g, or t
  misc_feature (639)..(639): n is a, c, g, or t
  misc_feature (642)..(642): n is a, c, g, or t
  misc_feature (645)..(645): n is a, c, g, or t
  misc_feature (648)..(648): n is a, c, g, or t
  misc_feature (651)..(651): n is a, c, g, or t
  misc_feature (654)..(654): n is a, c, g, or t
  misc_feature (657)..(657): n is a, c, g, or t
  misc_feature (660)..(660): n is a, c, g, or t
  misc_feature (663)..(663): n is a, c, g, or t
  misc_feature (666)..(666): n is a, c, g, or t
  misc_feature (669)..(669): n is a, c, g, or t
  misc_feature (672)..(672): n is a, c, g, or t
  misc_feature (678)..(678): n is a, c, g, or t
  misc_feature (681)..(681): n is a, c, g, or t
  misc_feature (684)..(684): n is a, c, g, or t
  misc_feature (687)..(687): n is a, c, g, or t
  misc_feature (690)..(690): n is a, c, g, or t
  misc_feature (693)..(693): n is a, c, g, or t
  misc_feature (696)..(696): n is a, c, g, or t
  misc_feature (699)..(699): n is a, c, g, or t
  misc_feature (702)..(702): n is a, c, g, or t
  misc_feature (708)..(708): n is a, c, g, or t
  misc_feature (714)..(714): n is a, c, g, or t
  misc_feature (717)..(717): n is a, c, g, or t
  misc_feature (723)..(723): n is a, c, g, or t
  misc_feature (726)..(726): n is a, c, g, or t
  misc_feature (729)..(729): n is a, c, g, or t
  misc_feature (735)..(735): n is a, c, g, or t
  misc_feature (738)..(738): n is a, c, g, or t
  misc_feature (744)..(744): n is a, c, g, or t
  misc_feature (750)..(750): n is a, c, g, or t
  misc_feature (753)..(753): n is a, c, g, or t
  misc_feature (756)..(756): n is a, c, g, or t
  misc_feature (759)..(759): n is a, c, g, or t
  misc_feature (762)..(762): n is a, c, g, or t
  misc_feature (768)..(768): n is a, c, g, or t
  misc_feature (771)..(771): n is a, c, g, or t
  misc_feature (780)..(780): n is a, c, g, or t
  misc_feature (783)..(783): n is a, c, g, or t
  misc_feature (789)..(789): n is a, c, g, or t
  misc_feature (792)..(792): n is a, c, g, or t
  misc_feature (795)..(795): n is a, c, g, or t
  misc_feature (798)..(798): n is a, c, g, or t
  misc_feature (804)..(804): n is a, c, g, or t
  misc_feature (807)..(807): n is a, c, g, or t
  misc_feature (810)..(810): n is a, c, g, or t
  misc_feature (813)..(813): n is a, c, g, or t
  misc_feature (822)..(822): n is a, c, g, or t
  misc_feature (828)..(828): n is a, c, g, or t
  misc_feature (831)..(831): n is a, c, g, or t
  misc_feature (837)..(837): n is a, c, g, or t
  misc_feature (840)..(840): n is a, c, g, or t
  misc_feature (846)..(846): n is a, c, g, or t
  misc_feature (849)..(849): n is a, c, g, or t
  misc_feature (852)..(852): n is a, c, g, or t
  misc_feature (858)..(858): n is a, c, g, or t
  misc_feature (864)..(864): n is a, c, g, or t
  misc_feature (867)..(867): n is a, c, g, or t
  misc_feature (873)..(873): n is a, c, g, or t
  misc_feature (876)..(876): n is a, c, g, or t
  misc_feature (879)..(879): n is a, c, g, or t
  misc_feature (885)..(885): n is a, c, g, or t
  misc_feature (888)..(888): n is a, c, g, or t
  misc_feature (891)..(891): n is a, c, g, or t
  misc_feature (894)..(894): n is a, c, g, or t
  misc_feature (897)..(897): n is a, c, g, or t
  misc_feature (903)..(903): n is a, c, g, or t
  misc_feature (909)..(909): n is a, c, g, or t
  misc_feature (912)..(912): n is a, c, g, or t
  misc_feature (915)..(915): n is a, c, g, or t
  misc_feature (918)..(918): n is a, c, g, or t
  misc_feature (921)..(921): n is a, c, g, or t
  misc_feature (927)..(927): n is a, c, g, or t
  misc_feature (930)..(930): n is a, c, g, or t
  misc_feature (933)..(933): n is a, c, g, or t
  misc_feature (936)..(936): n is a, c, g, or t
  misc_feature (939)..(939): n is a, c, g, or t
  misc_feature (945)..(945): n is a, c, g, or t
  misc_feature (948)..(948): n is a, c, g, or t
  misc_feature (957)..(957): n is a, c, g, or t
  misc_feature (963)..(963): n is a, c, g, or t
  misc_feature (966)..(966): n is a, c, g, or t
  misc_feature (972)..(972): n is a, c, g, or t
  misc_feature (975)..(975): n is a, c, g, or t
  misc_feature (978)..(978): n is a, c, g, or t
  misc_feature (981)..(981): n is a, c, g, or t
  misc_feature (984)..(984): n is a, c, g, or t
  misc_feature (987)..(987): n is a, c, g, or t
  misc_feature (993)..(993): n is a, c, g, or t
  misc_feature (999)..(999): n is a, c, g, or t
  misc_feature (1002)..(1002): n is a, c, g, or t
  misc_feature (1008)..(1008): n is a, c, g, or t
ggncarmgnggngaymgnggnccnathggnwsnathggnccnaarggnathccnggngargayggntaymgnggntayccnggngaygarggnggnccnggngarmgnggnccnccnggngtnaayggnacncarggnttycarggntgyccnggncarmgnggngtnaarggnwsnmgnggnttyccnggngaraarggngargtnggngarathggnytngayggnytngayggngargayggngayaarggnytnccnggnwsnwsnggngaraarggnaayccnggnmgnmgnggngayaarggnccnmgnggngaraarggngarmgnggngaygtnggnathmgnggngayccnggnaayccnggncargaywsncargarmgnggnccnaarggngaracnggngayytnggnccnatgggngtnccnggnmgngayggngtnccnggnggnccnggngaracnggnaaraayggnggnttyggnmgnmgnggnccnccnggngcnaarggnaayaarggnggnccnggncarccnggnttygarggngarcarggnacnmgnggngcncarggnccngcnggnccngcnggnccnccnggnytnathggngarcarggnathwsnggnccnmgnggnwsnggnggngcngcnggngcnccnggngarmgnggnmgnacnggnccnytnggnmgnaarggngarccnggngarccnggnccnaarggnggnathggnaaymgnggnccnmgnggngaracnggngaygayggnmgngayggngtnggnwsngarggnmgnmgnggnaaraarggngarmgnggnttyccnggntayccnggnccnaarggnaayccnggngarccnggnytnaayggnacnacnggnccnaarggnathmgnggnmgnmgnggnaaywsnggnccnccnggnathgtnggncaraarggngayccnggntayccnggnccngcnggnccnaarggnaaymgnggngaywsn

SEQ ID NO: 1112 - DNA, 1008 bp, Artificial Sequence
  hCol-CNA17 (alpha5(VI) THD)
  misc_feature (3)..(3): n is a, c, g, or t
  misc_feature (9)..(9): n is a, c, g, or t
  misc_feature (12)..(12): n is a, c, g, or t
  misc_feature (15)..(15): n is a, c, g, or t
  misc_feature (21)..(21): n is a, c, g, or t
  misc_feature (24)..(24): n is a, c, g, or t
  misc_feature (27)..(27): n is a, c, g, or t
  misc_feature (30)..(30): n is a, c, g, or t
  misc_feature (33)..(33): n is a, c, g, or t
  misc_feature (39)..(39): n is a, c, g, or t
  misc_feature (48)..(48): n is a, c, g, or t
  misc_feature (51)..(51): n is a, c, g, or t
  misc_feature (57)..(57): n is a, c, g, or t
  misc_feature (60)..(60): n is a, c, g, or t
  misc_feature (66)..(66): n is a, c, g, or t
  misc_feature (69)..(69): n is a, c, g, or t
  misc_feature (72)..(72): n is a, c, g, or t
  misc_feature (75)..(75): n is a, c, g, or t
  misc_feature (81)..(81): n is a, c, g, or t
  misc_feature (84)..(84): n is a, c, g, or t
  misc_feature (93)..(93): n is a, c, g, or t
  misc_feature (99)..(99): n is a, c, g, or t
  misc_feature (102)..(102): n is a, c, g, or t
  misc_feature (105)..(105): n is a, c, g, or t
  misc_feature (108)..(108): n is a, c, g, or t
  misc_feature (111)..(111): n is a, c, g, or t
  misc_feature (117)..(117): n is a, c, g, or t
  misc_feature (120)..(120): n is a, c, g, or t
  misc_feature (123)..(123): n is a, c, g, or t
  misc_feature (129)..(129): n is a, c, g, or t
  misc_feature (138)..(138): n is a, c, g, or t
  misc_feature (144)..(144): n is a, c, g, or t
  misc_feature (147)..(147): n is a, c, g, or t
  misc_feature (153)..(153): n is a, c, g, or t
  misc_feature (156)..(156): n is a, c, g, or t
  misc_feature (159)..(159): n is a, c, g, or t
  misc_feature (165)..(165): n is a, c, g, or t
  misc_feature (174)..(174): n is a, c, g, or t
  misc_feature (177)..(177): n is a, c, g, or t
  misc_feature (183)..(183): n is a, c, g, or t
  misc_feature (189)..(189): n is a, c, g, or t
  misc_feature (192)..(192): n is a, c, g, or t
  misc_feature (195)..(195): n is a, c, g, or t
  misc_feature (201)..(201): n is a, c, g, or t
  misc_feature (204)..(204): n is a, c, g, or t
  misc_feature (210)..(210): n is a, c, g, or t
  misc_feature (219)..(219): n is a, c, g, or t
  misc_feature (228)..(228): n is a, c, g, or t
  misc_feature (231)..(231): n is a, c, g, or t
  misc_feature (237)..(237): n is a, c, g, or t
  misc_feature (246)..(246): n is a, c, g, or t
  misc_feature (255)..(255): n is a, c, g, or t
  misc_feature (261)..(261): n is a, c, g, or t
  misc_feature (264)..(264): n is a, c, g, or t
  misc_feature (273)..(273): n is a, c, g, or t
  misc_feature (282)..(282): n is a, c, g, or t
  misc_feature (288)..(288): n is a, c, g, or t
  misc_feature (291)..(291): n is a, c, g, or t
  misc_feature (294)..(294): n is a, c, g, or t
  misc_feature (300)..(300): n is a, c, g, or t
  misc_feature (303)..(303): n is a, c, g, or t
  misc_feature (306)..(306): n is a, c, g, or t
  misc_feature (309)..(309): n is a, c, g, or t
  misc_feature (312)..(312): n is a, c, g, or t
  misc_feature (315)..(315): n is a, c, g, or t
  misc_feature (318)..(318): n is a, c, g, or t
  misc_feature (321)..(321): n is a, c, g, or t
  misc_feature (324)..(324): n is a, c, g, or t
  misc_feature (327)..(327): n is a, c, g, or t
  misc_feature (336)..(336): n is a, c, g, or t
  misc_feature (345)..(345): n is a, c, g, or t
  misc_feature (351)..(351): n is a, c, g, or t
  misc_feature (354)..(354): n is a, c, g, or t
  misc_feature (360)..(360): n is a, c, g, or t
  misc_feature (363)..(363): n is a, c, g, or t
  misc_feature (369)..(369): n is a, c, g, or t
  misc_feature (372)..(372): n is a, c, g, or t
  misc_feature (393)..(393): n is a, c, g, or t
  misc_feature (402)..(402): n is a, c, g, or t
  misc_feature (405)..(405): n is a, c, g, or t
  misc_feature (411)..(411): n is a, c, g, or t
  misc_feature (420)..(420): n is a, c, g, or t
  misc_feature (423)..(423): n is a, c, g, or t
  misc_feature (429)..(429): n is a, c, g, or t
  misc_feature (432)..(432): n is a, c, g, or t
  misc_feature (435)..(435): n is a, c, g, or t
  misc_feature (438)..(438): n is a, c, g, or t
  misc_feature (447)..(447): n is a, c, g, or t
  misc_feature (450)..(450): n is a, c, g, or t
  misc_feature (456)..(456): n is a, c, g, or t
  misc_feature (459)..(459): n is a, c, g, or t
  misc_feature (462)..(462): n is a, c, g, or t
  misc_feature (465)..(465): n is a, c, g, or t
  misc_feature (468)..(468): n is a, c, g, or t
  misc_feature (471)..(471): n is a, c, g, or t
  misc_feature (474)..(474): n is a, c, g, or t
  misc_feature (477)..(477): n is a, c, g, or t
  misc_feature (480)..(480): n is a, c, g, or t
  misc_feature (483)..(483): n is a, c, g, or t
  misc_feature (486)..(486): n is a, c, g, or t
  misc_feature (492)..(492): n is a, c, g, or t
  misc_feature (498)..(498): n is a, c, g, or t
  misc_feature (501)..(501): n is a, c, g, or t
  misc_feature (504)..(504): n is a, c, g, or t
  misc_feature (507)..(507): n is a, c, g, or t
  misc_feature (510)..(510): n is a, c, g, or t
  misc_feature (513)..(513): n is a, c, g, or t
  misc_feature (516)..(516): n is a, c, g, or t
  misc_feature (519)..(519): n is a, c, g, or t
  misc_feature (525)..(525): n is a, c, g, or t
  misc_feature (528)..(528): n is a, c, g, or t
  misc_feature (534)..(534): n is a, c, g, or t
  misc_feature (537)..(537): n is a, c, g, or t
  misc_feature (540)..(540): n is a, c, g, or t
  misc_feature (543)..(543): n is a, c, g, or t
  misc_feature (546)..(546): n is a, c, g, or t
  misc_feature (549)..(549): n is a, c, g, or t
  misc_feature (552)..(552): n is a, c, g, or t
  misc_feature (555)..(555): n is a, c, g, or t
  misc_feature (558)..(558): n is a, c, g, or t
  misc_feature (564)..(564): n is a, c, g, or t
  misc_feature (567)..(567): n is a, c, g, or t
  misc_feature (573)..(573): n is a, c, g, or t
  misc_feature (576)..(576): n is a, c, g, or t
  misc_feature (582)..(582): n is a, c, g, or t
  misc_feature (585)..(585): n is a, c, g, or t
  misc_feature (591)..(591): n is a, c, g, or t
  misc_feature (597)..(597): n is a, c, g, or t
  misc_feature (600)..(600): n is a, c, g, or t
  misc_feature (603)..(603): n is a, c, g, or t
  misc_feature (609)..(609): n is a, c, g, or t
  misc_feature (618)..(618): n is a, c, g, or t
  misc_feature (621)..(621): n is a, c, g, or t
  misc_feature (627)..(627): n is a, c, g, or t
  misc_feature (636)..(636): n is a, c, g, or t
  misc_feature (639)..(639): n is a, c, g, or t
  misc_feature (645)..(645): n is a, c, g, or t
  misc_feature (648)..(648): n is a, c, g, or t
  misc_feature (651)..(651): n is a, c, g, or t
  misc_feature (654)..(654): n is a, c, g, or t
  misc_feature (657)..(657): n is a, c, g, or t
  misc_feature (663)..(663): n is a, c, g, or t
  misc_feature (666)..(666): n is a, c, g, or t
  misc_feature (672)..(672): n is a, c, g, or t
  misc_feature (675)..(675): n is a, c, g, or t
  misc_feature (678)..(678): n is a, c, g, or t
  misc_feature (681)..(681): n is a, c, g, or t
  misc_feature (684)..(684): n is a, c, g, or t
  misc_feature (687)..(687): n is a, c, g, or t
  misc_feature (690)..(690): n is a, c, g, or t
  misc_feature (693)..(693): n is a, c, g, or t
  misc_feature (696)..(696): n is a, c, g, or t
  misc_feature (699)..(699): n is a, c, g, or t
  misc_feature (708)..(708): n is a, c, g, or t
  misc_feature (714)..(714): n is a, c, g, or t
  misc_feature (717)..(717): n is a, c, g, or t
  misc_feature (720)..(720): n is a, c, g, or t
  misc_feature (723)..(723): n is a, c, g, or t
  misc_feature (726)..(726): n is a, c, g, or t
  misc_feature (732)..(732): n is a, c, g, or t
  misc_feature (735)..(735): n is a, c, g, or t
  misc_feature (738)..(738): n is a, c, g, or t
  misc_feature (741)..(741): n is a, c, g, or t
  misc_feature (744)..(744): n is a, c, g, or t
  misc_feature (750)..(750): n is a, c, g, or t
  misc_feature (753)..(753): n is a, c, g, or t
  misc_feature (759)..(759): n is a, c, g, or t
  misc_feature (762)..(762): n is a, c, g, or t
  misc_feature (765)..(765): n is a, c, g, or t
  misc_feature (771)..(771): n is a, c, g, or t
  misc_feature (777)..(777): n is a, c, g, or t
  misc_feature (780)..(780): n is a, c, g, or t
  misc_feature (786)..(786): n is a, c, g, or t
  misc_feature (789)..(789): n is a, c, g, or t
  misc_feature (795)..(795): n is a, c, g, or t
  misc_feature (804)..(804): n is a, c, g, or t
  misc_feature (807)..(807): n is a, c, g, or t
  misc_feature (813)..(813): n is a, c, g, or t
  misc_feature (816)..(816): n is a, c, g, or t
  misc_feature (822)..(822): n is a, c, g, or t
  misc_feature (825)..(825): n is a, c, g, or t
  misc_feature (828)..(828): n is a, c, g, or t
  misc_feature (831)..(831): n is a, c, g, or t
  misc_feature (837)..(837): n is a, c, g, or t
  misc_feature (840)..(840): n is a, c, g, or t
  misc_feature (846)..(846): n is a, c, g, or t
  misc_feature (849)..(849): n is a, c, g, or t
  misc_feature (858)..(858): n is a, c, g, or t
  misc_feature (867)..(867): n is a, c, g, or t
  misc_feature (873)..(873): n is a, c, g, or t
  misc_feature (876)..(876): n is a, c, g, or t
  misc_feature (882)..(882): n is a, c, g, or t
  misc_feature (885)..(885): n is a, c, g, or t
  misc_feature (888)..(888): n is a, c, g, or t
  misc_feature (891)..(891): n is a, c, g, or t
  misc_feature (894)..(894): n is a, c, g, or t
  misc_feature (897)..(897): n is a, c, g, or t
  misc_feature (903)..(903): n is a, c, g, or t
  misc_feature (909)..(909): n is a, c, g, or t
  misc_feature (912)..(912): n is a, c, g, or t
  misc_feature (915)..(915): n is a, c, g, or t
  misc_feature (918)..(918): n is a, c, g, or t
  misc_feature (921)..(921): n is a, c, g, or t
  misc_feature (924)..(924): n is a, c, g, or t
  misc_feature (927)..(927): n is a, c, g, or t
  misc_feature (930)..(930): n is a, c, g, or t
  misc_feature (933)..(933): n is a, c, g, or t
  misc_feature (939)..(939): n is a, c, g, or t
  misc_feature (948)..(948): n is a, c, g, or t
  misc_feature (951)..(951): n is a, c, g, or t
  misc_feature (954)..(954): n is a, c, g, or t
  misc_feature (957)..(957): n is a, c, g, or t
  misc_feature (960)..(960): n is a, c, g, or t
  misc_feature (963)..(963): n is a, c, g, or t
  misc_feature (966)..(966): n is a, c, g, or t
  misc_feature (969)..(969): n is a, c, g, or t
  misc_feature (972)..(972): n is a, c, g, or t
  misc_feature (975)..(975): n is a, c, g, or t
  misc_feature (981)..(981): n is a, c, g, or t
  misc_feature (984)..(984): n is a, c, g, or t
  misc_feature (993)..(993): n is a, c, g, or t
  misc_feature (999)..(999): n is a, c, g, or t
  misc_feature (1002)..(1002): n is a, c, g, or t
  misc_feature (1008)..(1008): n is a, c, g, or t
ggnathccnggnccncayggnacnmgnggnytncargcnatgaarggnwsncarggnytnaarggnwsnmgnggncaymgnggngargayggnaayccnggngtnmgnggngayacnggnccncarggngayaarggnathgcnggntgyccnggngcntggggncaraarggnytnaarggnttywsnggnccnaarggnggncayggngaygayggnathgayggnytngayggngargarggntgycayggnttyccnggnathaarggngaraarggngayccnggnwsncarggnwsnccnggnwsnmgnggngcnccnggncartayggngaraarggnttyccnggngayccnggnaayccnggncaraayaayaayathaarggncaraarggnwsnaarggngarcarggnmgncarggnmgnwsnggncaraarggngtncarggnwsnccnwsnwsnmgnggnwsnmgnggnmgngarggncarmgnggnytnmgnggngtnwsnggngarccnggnaayccnggnccnacnggnacnytnggngcngarggnytncarggnccncarggnwsncarggnaayccnggnmgnaarggngaraarggnwsncarggncaraarggnccncarggnwsnccnggnytnatgggngcnaarggnwsnacnggnmgnccnggnytnytnggnaaraarggngarccnggnytnccnggngayytnggnccngtnggncaracnggncarmgnggnmgncarggngaywsnggnathccnggntayggncaratgggnmgnaarggngtnaarggnccnmgnggnttyccnggngaygcnggncaraarggngayathggnaayccnggnathccnggnggnccnggnccnaarggnttymgnggnytngcnytnacngtnggnytnaarggngargarggnwsnmgnggnytnccnggnccnccnggncarmgnggnathaarggnatggcnggncarccn

SEQ ID NO: 1113 - DNA, 1008 bp, Artificial Sequence
  hCol-CNA18 (alpha6(VI) THD)
  misc_feature (3)..(3): n is a, c, g, or t
  misc_feature (6)..(6): n is a, c, g, or t
  misc_feature (12)..(12): n is a, c, g, or t
  misc_feature (15)..(15): n is a, c, g, or t
  misc_feature (21)..(21): n is a, c, g, or t
  misc_feature (27)..(27): n is a, c, g, or t
  misc_feature (30)..(30): n is a, c, g, or t
  misc_feature (33)..(33): n is a, c, g, or t
  misc_feature (36)..(36): n is a, c, g, or t
  misc_feature (39)..(39): n is a, c, g, or t
  misc_feature (45)..(45): n is a, c, g, or t
  misc_feature (48)..(48): n is a, c, g, or t
  misc_feature (51)..(51): n is a, c, g, or t
  misc_feature (54)..(54): n is a, c, g, or t
  misc_feature (57)..(57): n is a, c, g, or t
  misc_feature (66)..(66): n is a, c, g, or t
  misc_feature (69)..(69): n is a, c, g, or t
  misc_feature (75)..(75): n is a, c, g, or t
  misc_feature (81)..(81): n is a, c, g, or t
  misc_feature (84)..(84): n is a, c, g, or t
  misc_feature (93)..(93): n is a, c, g, or t
  misc_feature (99)..(99): n is a, c, g, or t
  misc_feature (102)..(102): n is a, c, g, or t
  misc_feature (108)..(108): n is a, c, g, or t
  misc_feature (111)..(111): n is a, c, g, or t
  misc_feature (114)..(114): n is a, c, g, or t
  misc_feature (117)..(117): n is a, c, g, or t
  misc_feature (120)..(120): n is a, c, g, or t
  misc_feature (123)..(123): n is a, c, g, or t
  misc_feature (126)..(126): n is a, c, g, or t
  misc_feature (129)..(129): n is a, c, g, or t
  misc_feature (138)..(138): n is a, c, g, or t
  misc_feature (141)..(141): n is a, c, g, or t
  misc_feature (147)..(147): n is a, c, g, or t
  misc_feature (156)..(156): n is a, c, g, or t
  misc_feature (159)..(159): n is a, c, g, or t
  misc_feature (165)..(165): n is a, c, g, or t
  misc_feature (168)..(168): n is a, c, g, or t
  misc_feature (174)..(174): n is a, c, g, or t
  misc_feature (180)..(180): n is a, c, g, or t
  misc_feature (183)..(183): n is a, c, g, or t
  misc_feature (186)..(186): n is a, c, g, or t
  misc_feature (192)..(192): n is a, c, g, or t
  misc_feature (201)..(201): n is a, c, g, or t
  misc_feature (207)..(207): n is a, c, g, or t
  misc_feature (210)..(210): n is a, c, g, or t
  misc_feature (219)..(219): n is a, c, g, or t
  misc_feature (228)..(228): n is a, c, g, or t
  misc_feature (231)..(231): n is a, c, g, or t
  misc_feature (237)..(237): n is a, c, g, or t
  misc_feature (246)..(246): n is a, c, g, or t
  misc_feature (255)..(255): n is a, c, g, or t
  misc_feature (258)..(258): n is a, c, g, or t
  misc_feature (261)..(261): n is a, c, g, or t
  misc_feature (264)..(264): n is a, c, g, or t
  misc_feature (267)..(267): n is a, c, g, or t
  misc_feature (273)..(273): n is a, c, g, or t
  misc_feature (282)..(282): n is a, c, g, or t
  misc_feature (291)..(291): n is a, c, g, or t
  misc_feature (294)..(294): n is a, c, g, or t
  misc_feature (300)..(300): n is a, c, g, or t
  misc_feature (303)..(303): n is a, c, g, or t
  misc_feature (306)..(306): n is a, c, g, or t
  misc_feature (309)..(309): n is a, c, g, or t
  misc_feature (315)..(315): n is a, c, g, or t
  misc_feature (318)..(318): n is a, c, g, or t
  misc_feature (321)..(321): n is a, c, g, or t
  misc_feature (324)..(324): n is a, c, g, or t
  misc_feature (327)..(327): n is a, c, g, or t
  misc_feature (333)..(333): n is a, c, g, or t
  misc_feature (336)..(336): n is a, c, g, or t
  misc_feature (339)..(339): n is a, c, g, or t
  misc_feature (345)..(345): n is a, c, g, or t
  misc_feature (348)..(348): n is a, c, g, or t
  misc_feature (351)..(351): n is a, c, g, or t
  misc_feature (354)..(354): n is a, c, g, or t
  misc_feature (360)..(360): n is a, c, g, or t
  misc_feature (363)..(363): n is a, c, g, or t
  misc_feature (366)..(366): n is a, c, g, or t
  misc_feature (369)..(369): n is a, c, g, or t
  misc_feature (372)..(372): n is a, c, g, or t
  misc_feature (375)..(375): n is a, c, g, or t
  misc_feature (381)..(381): n is a, c, g, or t
  misc_feature (384)..(384): n is a, c, g, or t
  misc_feature (393)..(393): n is a, c, g, or t
  misc_feature (396)..(396): n is a, c, g, or t
  misc_feature (399)..(399): n is a, c, g, or t
  misc_feature (402)..(402): n is a, c, g, or t
  misc_feature (405)..(405): n is a, c, g, or t
  misc_feature (411)..(411): n is a, c, g, or t
  misc_feature (417)..(417): n is a, c, g, or t
  misc_feature (420)..(420): n is a, c, g, or t
  misc_feature (423)..(423): n is a, c, g, or t
  misc_feature (429)..(429): n is a, c, g, or t
  misc_feature (432)..(432): n is a, c, g, or t
  misc_feature (435)..(435): n is a, c, g, or t
  misc_feature (438)..(438): n is a, c, g, or t
  misc_feature (444)..(444): n is a, c, g, or t
  misc_feature (447)..(447): n is a, c, g, or t
  misc_feature (450)..(450): n is a, c, g, or t
  misc_feature (453)..(453): n is a, c, g, or t
  misc_feature (456)..(456): n is a, c, g, or t
  misc_feature (459)..(459): n is a, c, g, or t
  misc_feature (462)..(462): n is a, c, g, or t
  misc_feature (465)..(465): n is a, c, g, or t
  misc_feature (468)..(468): n is a, c, g, or t
  misc_feature (471)..(471): n is a, c, g, or t
  misc_feature (474)..(474): n is a, c, g, or t
  misc_feature (480)..(480): n is a, c, g, or t
  misc_feature (483)..(483): n is a, c, g, or t
  misc_feature (486)..(486): n is a, c, g, or t
  misc_feature (492)..(492): n is a, c, g, or t
  misc_feature (495)..(495): n is a, c, g, or t
  misc_feature (498)..(498): n is a, c, g, or t
  misc_feature (501)..(501): n is a, c, g, or t
  misc_feature (507)..(507): n is a, c, g, or t
  misc_feature (510)..(510): n is a, c, g, or t
  misc_feature (513)..(513): n is a, c, g, or t
  misc_feature (519)..(519): n is a, c, g, or t
  misc_feature (522)..(522): n is a, c, g, or t
  misc_feature (525)..(525): n is a, c, g, or t
  misc_feature (528)..(528): n is a, c, g, or t
  misc_feature (534)..(534): n is a, c, g, or t
  misc_feature (537)..(537): n is a, c, g, or t
  misc_feature (540)..(540): n is a, c, g, or t
  misc_feature (546)..(546): n is a, c, g, or t
  misc_feature (549)..(549): n is a, c, g, or t
  misc_feature (555)..(555): n is a, c, g, or t
  misc_feature (558)..(558): n is a, c, g, or t
  misc_feature (561)..(561): n is a, c, g, or t
  misc_feature (564)..(564): n is a, c, g, or t
  misc_feature (567)..(567): n is a, c, g, or t
  misc_feature (573)..(573): n is a, c, g, or t
  misc_feature (576)..(576): n is a, c, g, or t
  misc_feature (582)..(582): n is a, c, g, or t
  misc_feature (585)..(585): n is a, c, g, or t
  misc_feature (588)..(588): n is a, c, g, or t
  misc_feature (591)..(591): n is a, c, g, or t
  misc_feature (597)..(597): n is a, c, g, or t
  misc_feature (600)..(600): n is a, c, g, or t
  misc_feature (603)..(603): n is a, c, g, or t
  misc_feature (609)..(609): n is a, c, g, or t
  misc_feature (618)..(618): n is a, c, g, or t
  misc_feature (621)..(621): n is a, c, g, or t
  misc_feature (624)..(624): n is a, c, g, or t
  misc_feature (627)..(627): n is a, c, g, or t
  misc_feature (630)..(630): n is a, c, g, or t
  misc_feature (636)..(636): n is a, c, g, or t
  misc_feature (639)..(639): n is a, c, g, or t
  misc_feature (645)..(645): n is a, c, g, or t
  misc_feature (648)..(648): n is a, c, g, or t
  misc_feature (651)..(651): n is a, c, g, or t
  misc_feature (654)..(654): n is a, c, g, or t
  misc_feature (657)..(657): n is a, c, g, or t
  misc_feature (660)..(660): n is a, c, g, or t
  misc_feature (663)..(663): n is a, c, g, or t
  misc_feature (669)..(669): n is a, c, g, or t
  misc_feature (672)..(672): n is a, c, g, or t
  misc_feature (681)..(681): n is a, c, g, or t
  misc_feature (684)..(684): n is a, c, g, or t
  misc_feature (687)..(687): n is a, c, g, or t
  misc_feature (690)..(690): n is a, c, g, or t
  misc_feature (693)..(693): n is a, c, g, or t
  misc_feature (699)..(699): n is a, c, g, or t
  misc_feature (708)..(708): n is a, c, g, or t
  misc_feature (714)..(714): n is a, c, g, or t
  misc_feature (717)..(717): n is a, c, g, or t
  misc_feature (723)..(723): n is a, c, g, or t
  misc_feature (726)..(726): n is a, c, g, or t
  misc_feature (735)..(735): n is a, c, g, or t
  misc_feature (738)..(738): n is a, c, g, or t
  misc_feature (741)..(741): n is a, c, g, or t
  misc_feature (744)..(744): n is a, c, g, or t
  misc_feature (750)..(750): n is a, c, g, or t
  misc_feature (753)..(753): n is a, c, g, or t
  misc_feature (756)..(756): n is a, c, g, or t
  misc_feature (759)..(759): n is a, c, g, or t
  misc_feature (762)..(762): n is a, c, g, or t
  misc_feature (765)..(765): n is a, c, g, or t
  misc_feature (771)..(771): n is a, c, g, or t
  misc_feature (780)..(780): n is a, c, g, or t
  misc_feature (783)..(783): n is a, c, g, or t
  misc_feature (786)..(786): n is a, c, g, or t
  misc_feature (789)..(789): n is a, c, g, or t
  misc_feature (795)..(795): n is a, c, g, or t
  misc_feature (798)..(798): n is a, c, g, or t
  misc_feature (801)..(801): n is a, c, g, or t
  misc_feature (804)..(804): n is a, c, g, or t
  misc_feature (807)..(807): n is a, c, g, or t
  misc_feature (813)..(813): n is a, c, g, or t
  misc_feature (816)..(816): n is a, c, g, or t
  misc_feature (822)..(822): n is a, c, g, or t
  misc_feature (831)..(831): n is a, c, g, or t
  misc_feature (837)..(837): n is a, c, g, or t
  misc_feature (840)..(840): n is a, c, g, or t
  misc_feature (846)..(846): n is a, c, g, or t
  misc_feature (849)..(849): n is a, c, g, or t
  misc_feature (852)..(852): n is a, c, g, or t
  misc_feature (858)..(858): n is a, c, g, or t
  misc_feature (867)..(867): n is a, c, g, or t
  misc_feature (873)..(873): n is a, c, g, or t
  misc_feature (876)..(876): n is a, c, g, or t
  misc_feature (879)..(879): n is a, c, g, or t
  misc_feature (882)..(882): n is a, c, g, or t
  misc_feature (885)..(885): n is a, c, g, or t
  misc_feature (891)..(891): n is a, c, g, or t
  misc_feature (894)..(894): n is a, c, g, or t
  misc_feature (897)..(897): n is a, c, g, or t
  misc_feature (903)..(903): n is a, c, g, or t
  misc_feature (906)..(906): n is a, c, g, or t
  misc_feature (909)..(909): n is a, c, g, or t
  misc_feature (912)..(912): n is a, c, g, or t
  misc_feature (924)..(924): n is a, c, g, or t
  misc_feature (927)..(927): n is a, c, g, or t
  misc_feature (930)..(930): n is a, c, g, or t
  misc_feature (933)..(933): n is a, c, g, or t
  misc_feature (936)..(936): n is a, c, g, or t
  misc_feature (939)..(939): n is a, c, g, or t
  misc_feature (948)..(948): n is a, c, g, or t
  misc_feature (951)..(951): n is a, c, g, or t
  misc_feature (954)..(954): n is a, c, g, or t
  misc_feature (957)..(957): n is a, c, g, or t
  misc_feature (963)..(963): n is a, c, g, or t
  misc_feature (966)..(966): n is a, c, g, or t
  misc_feature (969)..(969): n is a, c, g, or t
  misc_feature (972)..(972): n is a, c, g, or t
  misc_feature (975)..(975): n is a, c, g, or t
  misc_feature (978)..(978): n is a, c, g, or t
  misc_feature (984)..(984): n is a, c, g, or t
  misc_feature (987)..(987): n is a, c, g, or t
  misc_feature (993)..(993): n is a, c, g, or t
  misc_feature (996)..(996): n is a, c, g, or t
  misc_feature (1002)..(1002): n is a, c, g, or t
  misc_feature (1005)..(1005): n is a, c, g, or t
  misc_feature (1008)..(1008): n is a, c, g, or t
ggnggngayggnacnatgggngayccnggnccnccnggnaarmgnggnccnccnggnttyaarggnwsngarggntayytnggngargarggnathgcnggngarmgnggngcnccnggnccngtnggngarcarggnacnaarggntgytayggnacnaarggnccnaarggnaaymgnggnytnaayggncargarggngargtnggngaraayggnathgayggnytnaayggngarcarggngayaayggnytnccnggnmgnaarggngaraarggngaygarggnwsncarggnwsnccnggnaarmgnggnacnccnggngaymgnggngcnaarggnytnmgnggngayccnggngcnccnggngtngaywsnwsnathgarggnccnacnggnytnaarggngarmgnggnmgncarggnmgnmgnggntggccnggnccnccnggnacnccnggnwsnmgnmgnaaracngcngcncayggnmgnmgnggncayacnggnccncarggnacngcnggnathccnggnccngayggnytngarggnwsnytnggnytnaarggnccncarggnccnmgnggngargcnggngtnaarggngaraarggnggngtnggnwsnaarggnccncarggnccnccnggnccnggnggngargcnggnaaycarggnmgnytnggnwsncarggnaayaarggngarccnggngayytnggngaraarggngcngtnggnttyccnggnccnmgnggnytncarggnaaygayggnwsnccnggntayggnwsngtnggnmgnaarggngcnaarggncargarggnttyccnggngarwsnggnccnaarggngarathggngayccnggnggnccnggngaracnggnytnaarggngcnmgnggnaaratgathwsngcnggnytnccnggngaratgggnwsnccnggngarccnggnccnccnggnmgnaarggngtnaarggngcnaarggnytngcn

SEQ ID NO: 1114 - DNA, 4590 bp, Artificial Sequence
  hCol-CNA19 (alpha1(VII) THD)
  misc_feature (3)..(3): n is a, c, g, or t
  misc_feature (12)..(12): n is a, c, g, or t
  misc_feature (18)..(18): n is a, c, g, or t
  misc_feature (21)..(21): n is a, c, g, or t
  misc_feature (30)..(30): n is a, c, g, or t
  misc_feature (33)..(33): n is a, c, g, or t
  misc_feature (36)..(36): n is a, c, g, or t
  misc_feature (39)..(39): n is a, c, g, or t
  misc_feature (45)..(45): n is a, c, g, or t
  misc_feature (48)..(48): n is a, c, g, or t
  misc_feature (51)..(51): n is a, c, g, or t
  misc_feature (54)..(54): n is a, c, g, or t
  misc_feature (57)..(57): n is a, c, g, or t
  misc_feature (63)..(63): n is a, c, g, or t
  misc_feature (66)..(66): n is a, c, g, or t
  misc_feature (69)..(69): n is a, c, g, or t
  misc_feature (72)..(72): n is a, c, g, or t
  misc_feature (75)..(75): n is a, c, g, or t
  misc_feature (78)..(78): n is a, c, g, or t
  misc_feature (81)..(81): n is a, c, g, or t
  misc_feature (84)..(84): n is a, c, g, or t
  misc_feature (87)..(87): n is a, c, g, or t
  misc_feature (90)..(90): n is a, c, g, or t
  misc_feature (93)..(93): n is a, c, g, or t
  misc_feature (96)..(96): n is a, c, g, or t
  misc_feature (102)..(102): n is a, c, g, or t
  misc_feature (105)..(105): n is a, c, g, or t
  misc_feature (108)..(108): n is a, c, g, or t
  misc_feature (111)..(111): n is a, c, g, or t
  misc_feature (114)..(114): n is a, c, g, or t
  misc_feature (117)..(117): n is a, c, g, or t
  misc_feature (120)..(120): n is a, c, g, or t
  misc_feature (123)..(123): n is a, c, g, or t
  misc_feature (129)..(129): n is a, c, g, or t
  misc_feature (135)..(135): n is a, c, g, or t
  misc_feature (138)..(138): n is a, c, g, or t
  misc_feature (144)..(144): n is a, c, g, or t
  misc_feature (147)..(147): n is a, c, g, or t
  misc_feature (150)..(150): n is a, c, g, or t
  misc_feature (156)..(156): n is a, c, g, or t
  misc_feature (159)..(159): n is a, c, g, or t
  misc_feature (162)..(162): n is a, c, g, or t
  misc_feature (165)..(165): n is a, c, g, or t
  misc_feature (168)..(168): n is a, c, g, or t
  misc_feature (171)..(171): n is a, c, g, or t
  misc_feature (174)..(174): n is a, c, g, or t
  misc_feature (177)..(177): n is a, c, g, or t
  misc_feature (180)..(180): n is a, c, g, or t
  misc_feature (183)..(183): n is a, c, g, or t
  misc_feature (189)..(189): n is a, c, g, or t
  misc_feature (192)..(192): n is a, c, g, or t
  misc_feature (195)..(195): n is a, c, g, or t
  misc_feature (198)..(198): n is a, c, g, or t
  misc_feature (201)..(201): n is a, c, g, or t
  misc_feature (204)..(204): n is a, c, g, or t
  misc_feature (207)..(207): n is a, c, g, or t
  misc_feature (210)..(210): n is a, c, g, or t
  misc_feature (213)..(213): n is a, c, g, or t
  misc_feature (219)..(219): n is a, c, g, or t
  misc_feature (222)..(222): n is a, c, g, or t
  misc_feature (225)..(225): n is a, c, g, or t
  misc_feature (228)..(228): n is a, c, g, or t
  misc_feature (231)..(231): n is a, c, g, or t
  misc_feature (234)..(234): n is a, c, g, or t
  misc_feature (237)..(237): n is a, c, g, or t
  misc_feature (240)..(240): n is a, c, g, or t
  misc_feature (243)..(243): n is a, c, g, or t
  misc_feature (246)..(246): n is a, c, g, or t
  misc_feature (252)..(252): n is a, c, g, or t
  misc_feature (255)..(255): n is a, c, g, or t
  misc_feature (261)..(261): n is a, c, g, or t
  misc_feature (264)..(264): n is a, c, g, or t
  misc_feature (267)..(267): n is a, c, g, or t
  misc_feature (270)..(270): n is a, c, g, or t
  misc_feature (273)..(273): n is a, c, g, or t
  misc_feature (276)..(276): n is a, c, g, or t
  misc_feature (282)..(282): n is a, c, g, or t
  misc_feature (288)..(288): n is a, c, g, or t
  misc_feature (291)..(291): n is a, c, g, or t
  misc_feature (294)..(294): n is a, c, g, or t
  misc_feature (297)..(297): n is a, c, g, or t
  misc_feature (300)..(300): n is a, c, g, or t
  misc_feature (306)..(306): n is a, c, g, or t
  misc_feature (312)..(312): n is a, c, g, or t
  misc_feature (315)..(315): n is a, c, g, or t
  misc_feature (321)..(321): n is a, c, g, or t
  misc_feature (324)..(324): n is a, c, g, or t
  misc_feature (327)..(327): n is a, c, g, or t
  misc_feature (330)..(330): n is a, c, g, or t
  misc_feature (333)..(333): n is a, c, g, or t
  misc_feature (336)..(336): n is a, c, g, or t
  misc_feature (339)..(339): n is a, c, g, or t
  misc_feature (345)..(345): n is a, c, g, or t
  misc_feature (351)..(351): n is a, c, g, or t
  misc_feature (354)..(354): n is a, c, g, or t
  misc_feature (357)..(357): n is a, c, g, or t
  misc_feature (360)..(360): n is a, c, g, or t
  misc_feature (363)..(363): n is a, c, g, or t
  misc_feature (366)..(366): n is a, c, g, or t
  misc_feature (369)..(369): n is a, c, g, or t
  misc_feature (372)..(372): n is a, c, g, or t
  misc_feature (375)..(375): n is a, c, g, or t
  misc_feature (378)..(378): n is a, c, g, or t
  misc_feature (381)..(381): n is a, c, g, or t
  misc_feature (384)..(384): n is a, c, g, or t
  misc_feature (387)..(387): n is a, c, g, or t
  misc_feature (390)..(390): n is a, c, g, or t
  misc_feature (396)..(396): n is a, c, g, or t
  misc_feature (399)..(399): n is a, c, g, or t
  misc_feature (402)..(402): n is a, c, g, or t
  misc_feature (405)..(405): n is a, c, g, or t
  misc_feature (408)..(408): n is a, c, g, or t
  misc_feature (411)..(411): n is a, c, g, or t
  misc_feature (414)..(414): n is a, c, g, or t
  misc_feature (417)..(417): n is a, c, g, or t
  misc_feature (420)..(420): n is a, c, g, or t
  misc_feature (423)..(423): n is a, c, g, or t
  misc_feature (426)..(426): n is a, c, g, or t
  misc_feature (429)..(429): n is a, c, g, or t
  misc_feature (432)..(432): n is a, c, g, or t
  misc_feature (441)..(441): n is a, c, g, or t
  misc_feature (450)..(450): n is a, c, g, or t
  misc_feature (456)..(456): n is a, c, g, or t
  misc_feature (459)..(459): n is a, c, g, or t
  misc_feature (465)..(465): n is a, c, g, or t
  misc_feature (468)..(468): n is a, c, g, or t
  misc_feature (471)..(471): n is a, c, g, or t
  misc_feature (474)..(474): n is a, c, g, or t
  misc_feature (477)..(477): n is a, c, g, or t
  misc_feature (480)..(480): n is a, c, g, or t
  misc_feature (483)..(483): n is a, c, g, or t
  misc_feature (489)..(489): n is a, c, g, or t
  misc_feature (492)..(492): n is a, c, g, or t
  misc_feature (498)..(498): n is a, c, g, or t
  misc_feature (501)..(501): n is a, c, g, or t
  misc_feature (504)..(504): n is a, c, g, or t
  misc_feature (510)..(510): n is a, c, g, or t
  misc_feature (513)..(513): n is a, c, g, or t
  misc_feature (516)..(516): n is a, c, g, or t
  misc_feature (519)..(519): n is a, c, g, or t
  misc_feature (522)..(522): n is a, c, g, or t
  misc_feature (525)..(525): n is a, c, g, or t
  misc_feature (528)..(528): n is a, c, g, or t
  misc_feature (531)..(531): n is a, c, g, or t
  misc_feature (534)..(534): n is a, c, g, or t
  misc_feature (537)..(537): n is a, c, g, or t
  misc_feature (540)..(540): n is a, c, g, or t
  misc_feature (543)..(543): n is a, c, g, or t
  misc_feature (549)..(549): n is a, c, g, or t
  misc_feature (552)..(552): n is a, c, g, or t
  misc_feature (555)..(555): n is a, c, g, or t
  misc_feature (558)..(558): n is a, c, g, or t
  misc_feature (561)..(561): n is a, c, g, or t
  misc_feature (564)..(564): n is a, c, g, or t
  misc_feature (567)..(567): n is a, c, g, or t
  misc_feature (576)..(576): n is a, c, g, or t
  misc_feature (585)..(585): n is a, c, g, or t
  misc_feature (591)..(591): n is a, c, g, or t
  misc_feature (600)..(600): n is a, c, g, or t
  misc_feature (603)..(603): n is a, c, g, or t
  misc_feature (606)..(606): n is a, c, g, or t
  misc_feature (609)..(609): n is a, c, g, or t
  misc_feature (612)..(612): n is a, c, g, or t
  misc_feature (615)..(615): n is a, c, g, or t
  misc_feature (618)..(618): n is a, c, g, or t
  misc_feature (624)..(624): n is a, c, g, or t
  misc_feature (627)..(627): n is a, c, g, or t
  misc_feature (630)..(630): n is a, c, g, or t
  misc_feature (633)..(633): n is a, c, g, or t
  misc_feature (636)..(636): n is a, c, g, or t
  misc_feature (645)..(645): n is a, c, g, or t
  misc_feature (648)..(648): n is a, c, g, or t
  misc_feature (651)..(651): n is a, c, g, or t
  misc_feature (654)..(654): n is a, c, g, or t
  misc_feature (657)..(657): n is a, c, g, or t
  misc_feature (660)..(660): n is a, c, g, or t
  misc_feature (663)..(663): n is a, c, g, or t
  misc_feature (666)..(666): n is a, c, g, or t
  misc_feature (672)..(672): n is a, c, g, or t
  misc_feature (675)..(675): n is a, c, g, or t
  misc_feature (681)..(681): n is a, c, g, or t
  misc_feature (687)..(687): n is a, c, g, or t
  misc_feature (690)..(690): n is a, c, g, or t
  misc_feature (696)..(696): n is a, c, g, or t
  misc_feature (699)..(699): n is a, c, g, or t
  misc_feature (702)..(702): n is a, c, g, or t
  misc_feature (705)..(705): n is a, c, g, or t
  misc_feature (708)..(708): n is a, c, g, or t
  misc_feature (714)..(714): n is a, c, g, or t
  misc_feature (717)..(717): n is a, c, g, or t
  misc_feature (726)..(726): n is a, c, g, or t
  misc_feature (732)..(732): n is a, c, g, or t
  misc_feature (735)..(735): n is a, c, g, or t
  misc_feature (738)..(738): n is a, c, g, or t
  misc_feature (741)..(741): n is a, c, g, or t
  misc_feature (744)..(744): n is a, c, g, or t
  misc_feature (747)..(747): n is a, c, g, or t
  misc_feature (750)..(750): n is a, c, g, or t
  misc_feature (753)..(753): n is a, c, g, or t
  misc_feature (756)..(756): n is a, c, g, or t
  misc_feature (759)..(759): n is a, c, g, or t
  misc_feature (762)..(762): n is a, c, g, or t
  misc_feature (765)..(765): n is a, c, g, or t
  misc_feature (768)..(768): n is a, c, g, or t
  misc_feature (771)..(771): n is a, c, g, or t
  misc_feature (774)..(774): n is a, c, g, or t
  misc_feature (777)..(777): n is a, c, g, or t
  misc_feature (780)..(780): n is a, c, g, or t
  misc_feature (783)..(783): n is a, c, g, or t
  misc_feature (786)..(786): n is a, c, g, or t
  misc_feature (789)..(789): n is a, c, g, or t
  misc_feature (792)..(792): n is a, c, g, or t
  misc_feature (798)..(798): n is a, c, g, or t
  misc_feature (801)..(801): n is a, c, g, or t
  misc_feature (807)..(807): n is a, c, g, or t
  misc_feature (810)..(810): n is a, c, g, or t
  misc_feature (813)..(813): n is a, c, g, or t
  misc_feature (816)..(816): n is a, c, g, or t
  misc_feature (819)..(819): n is a, c, g, or t
  misc_feature (822)..(822): n is a, c, g, or t
  misc_feature (825)..(825): n is a, c, g, or t
  misc_feature (828)..(828): n is a, c, g, or t
  misc_feature (834)..(834): n is a, c, g, or t
  misc_feature (843)..(843): n is a, c, g, or t
  misc_feature (849)..(849): n is a, c, g, or t
  misc_feature (852)..(852): n is a, c, g, or t
  misc_feature (855)..(855): n is a, c, g, or t
  misc_feature (858)..(858): n is a, c, g, or t
  misc_feature (861)..(861): n is a, c, g, or t
  misc_feature (867)..(867): n is a, c, g, or t
  misc_feature (870)..(870): n is a, c, g, or t
  misc_feature (873)..(873): n is a, c, g, or t
  misc_feature (876)..(876): n is a, c, g, or t
  misc_feature (879)..(879): n is a, c, g, or t
  misc_feature (882)..(882): n is a, c, g, or t
  misc_feature (885)..(885): n is a, c, g, or t
  misc_feature (888)..(888): n is a, c, g, or t
  misc_feature (891)..(891): n is a, c, g, or t
  misc_feature (894)..(894): n is a, c, g, or t
  misc_feature (897)..(897): n is a, c, g, or t
  misc_feature (903)..(903): n is a, c, g, or t
  misc_feature (912)..(912): n is a, c, g, or t
  misc_feature (918)..(918): n is a, c, g, or t
  misc_feature (921)..(921): n is a, c, g, or t
  misc_feature (924)..(924): n is a, c, g, or t
  misc_feature (927)..(927): n is a, c, g, or t
  misc_feature (930)..(930): n is a, c, g, or t
  misc_feature (933)..(933): n is a, c, g, or t
  misc_feature (936)..(936): n is a, c, g, or t
  misc_feature (939)..(939): n is a, c, g, or t
  misc_feature (942)..(942): n is a, c, g, or t
  misc_feature (945)..(945): n is a, c, g, or t
  misc_feature (948)..(948): n is a, c, g, or t
  misc_feature (951)..(951): n is a, c, g, or t
  misc_feature (957)..(957): n is a, c, g, or t
  misc_feature (963)..(963): n is a, c, g, or t
  misc_feature (966)..(966): n is a, c, g, or t
  misc_feature (969)..(969): n is a, c, g, or t
  misc_feature (972)..(972): n is a, c, g, or t
  misc_feature (975)..(975): n is a, c, g, or t
  misc_feature (978)..(978): n is a, c, g, or t
  misc_feature (981)..(981): n is a, c, g, or t
  misc_feature (984)..(984): n is a, c, g, or t
  misc_feature (987)..(987): n is a, c, g, or t
  misc_feature (990)..(990): n is a, c, g, or t
  misc_feature (996)..(996): n is a, c, g, or t
  misc_feature (999)..(999): n is a, c, g, or t
  misc_feature (1002)..(1002): n is a, c, g, or t
  misc_feature (1008)..(1008): n is a, c, g, or t
  misc_feature (1014)..(1014): n is a, c, g, or t
  misc_feature (1017)..(1017): n is a, c, g, or t
  misc_feature (1023)..(1023): n is a, c, g, or t
  misc_feature (1026)..(1026): n is a, c, g, or t
  misc_feature (1029)..(1029): n is a, c, g, or t
  misc_feature (1035)..(1035): n is a, c, g, or t
  misc_feature (1038)..(1038): n is a, c, g, or t
  misc_feature (1041)..(1041): n is a, c, g, or t
  misc_feature (1044)..(1044): n is a, c, g, or t
  misc_feature (1047)..(1047): n is a, c, g, or t
  misc_feature (1050)..(1050): n is a, c, g, or t
  misc_feature (1053)..(1053): n is a, c, g, or t
  misc_feature (1056)..(1056): n is a, c, g, or t
  misc_feature (1059)..(1059): n is a, c, g, or t
  misc_feature (1062)..(1062): n is a, c, g, or t
  misc_feature (1068)..(1068): n is a, c, g, or t
  misc_feature (1071)..(1071): n is a, c, g, or t
  misc_feature (1074)..(1074): n is a, c, g, or t
  misc_feature (1077)..(1077): n is a, c, g, or t
  misc_feature (1080)..(1080): n is a, c, g, or t
  misc_feature (1089)..(1089): n is a, c, g, or t
  misc_feature (1095)..(1095): n is a, c, g, or t
  misc_feature (1098)..(1098): n is a, c, g, or t
  misc_feature (1101)..(1101): n is a, c, g, or t
  misc_feature (1104)..(1104): n is a, c, g, or t
  misc_feature (1107)..(1107): n is a, c, g, or t
  misc_feature (1110)..(1110): n is a, c, g, or t
  misc_feature (1113)..(1113): n is a, c, g, or t
  misc_feature (1116)..(1116): n is a, c, g, or t
  misc_feature (1119)..(1119): n is a, c, g, or t
  misc_feature (1122)..(1122): n is a, c, g, or t
  misc_feature (1125)..(1125): n is a, c, g, or t
  misc_feature (1128)..(1128): n is a, c, g, or t
  misc_feature (1131)..(1131): n is a, c, g, or t
  misc_feature (1134)..(1134): n is a, c, g, or t
  misc_feature (1137)..(1137): n is a, c, g, or t
  misc_feature (1143)..(1143): n is a, c, g, or t
  misc_feature (1149)..(1149): n is a, c, g, or t
  misc_feature (1152)..(1152): n is a, c, g, or t
  misc_feature (1161)..(1161): n is a, c, g, or t
  misc_feature (1170)..(1170): n is a, c, g, or t
  misc_feature (1173)..(1173): n is a, c, g, or t
  misc_feature (1176)..(1176): n is a, c, g, or t
  misc_feature (1179)..(1179): n is a, c, g, or t
  misc_feature (1185)..(1185): n is a, c, g, or t
  misc_feature (1188)..(1188): n is a, c, g, or t
  misc_feature (1191)..(1191): n is a, c, g, or t
  misc_feature (1194)..(1194): n is a, c, g, or t
  misc_feature (1197)..(1197): n is a, c, g, or t
  misc_feature (1203)..(1203): n is a, c, g, or t
  misc_feature (1206)..(1206): n is a, c, g, or t
  misc_feature (1212)..(1212): n is a, c, g, or t
  misc_feature (1215)..(1215): n is a, c, g, or t
  misc_feature (1218)..(1218): n is a, c, g, or t
  misc_feature (1221)..(1221): n is a, c, g, or t
  misc_feature (1224)..(1224): n is a, c, g, or t
  misc_feature (1227)..(1227): n is a, c, g, or t
  misc_feature (1230)..(1230): n is a, c, g, or t
  misc_feature (1233)..(1233): n is a, c, g, or t
  misc_feature (1236)..(1236): n is a, c, g, or t
  misc_feature (1239)..(1239): n is a, c, g, or t
  misc_feature (1242)..(1242): n is a, c, g, or t
  misc_feature (1245)..(1245): n is a, c, g, or t
  misc_feature (1248)..(1248): n is a, c, g, or t
  misc_feature (1251)..(1251): n is a, c, g, or t
  misc_feature (1260)..(1260): n is a, c, g, or t
  misc_feature (1269)..(1269): n is a, c, g, or t
  misc_feature (1275)..(1275): n is a, c, g, or t
  misc_feature (1278)..(1278): n is a, c, g, or t
  misc_feature (1287)..(1287): n is a, c, g, or t
  misc_feature (1290)..(1290): n is a, c, g, or t
  misc_feature (1296)..(1296): n is a, c, g, or t
  misc_feature (1299)..(1299): n is a, c, g, or t
  misc_feature (1302)..(1302): n is a, c, g, or t
  misc_feature (1305)..(1305): n is a, c, g, or t
  misc_feature (1308)..(1308): n is a, c, g, or t
  misc_feature (1311)..(1311): n is a, c, g, or t
  misc_feature (1314)..(1314): n is a, c, g, or t
  misc_feature (1317)..(1317): n is a, c, g, or t
  misc_feature (1323)..(1323): n is a, c, g, or t
  misc_feature (1329)..(1329): n is a, c, g, or t
  misc_feature (1332)..(1332): n is a, c, g, or t
  misc_feature (1338)..(1338): n is a, c, g, or t
  misc_feature (1341)..(1341): n is a, c, g, or t
  misc_feature (1344)..(1344): n is a, c, g, or t
  misc_feature (1347)..(1347): n is a, c, g, or t
  misc_feature (1350)..(1350): n is a, c, g, or t
  misc_feature (1353)..(1353): n is a, c, g, or t
  misc_feature (1356)..(1356): n is a, c, g, or t
  misc_feature (1359)..(1359): n is a, c, g, or t
  misc_feature (1362)..(1362): n is a, c, g, or t
  misc_feature (1365)..(1365): n is a, c, g, or t
  misc_feature (1368)..(1368): n is a, c, g, or t
  misc_feature (1374)..(1374): n is a, c, g, or t
  misc_feature (1377)..(1377): n is a, c, g, or t
  misc_feature (1380)..(1380): n is a, c, g, or t
  misc_feature (1383)..(1383): n is a, c, g, or t
  misc_feature (1386)..(1386): n is a, c, g, or t
  misc_feature (1389)..(1389): n is a, c, g, or t
  misc_feature (1398)..(1398): n is a, c, g, or t
  misc_feature (1404)..(1404): n is a, c, g, or t
  misc_feature (1407)..(1407): n is a, c, g, or t
  misc_feature (1413)..(1413): n is a, c, g, or t
  misc_feature (1416)..(1416): n is a, c, g, or t
  misc_feature (1425)..(1425): n is a, c, g, or t
  misc_feature (1428)..(1428): n is a, c, g, or t
  misc_feature (1431)..(1431): n is a, c, g, or t
  misc_feature (1434)..(1434): n is a, c, g, or t
  misc_feature (1437)..(1437): n is a, c, g, or t
  misc_feature (1443)..(1443): n is a, c, g, or t
  misc_feature (1449)..(1449): n is a, c, g, or t
  misc_feature (1452)..(1452): n is a, c, g, or t
  misc_feature (1455)..(1455): n is a, c, g, or t
  misc_feature (1458)..(1458): n is a, c, g, or t
  misc_feature (1461)..(1461): n is a, c, g, or t
  misc_feature (1464)..(1464): n is a, c, g, or t
  misc_feature (1467)..(1467): n is a, c, g, or t
  misc_feature (1470)..(1470): n is a, c, g, or t
  misc_feature (1476)..(1476): n is a, c, g, or t
  misc_feature (1479)..(1479): n is a, c, g, or t
  misc_feature (1488)..(1488): n is a, c, g, or t
  misc_feature (1494)..(1494): n is a, c, g, or t
  misc_feature (1497)..(1497): n is a, c, g, or t
  misc_feature (1500)..(1500): n is a, c, g, or t
  misc_feature (1503)..(1503): n is a, c, g, or t
  misc_feature (1506)..(1506): n is a, c, g, or t
  misc_feature (1509)..(1509): n is a, c, g, or t
  misc_feature (1515)..(1515): n is a, c, g, or t
  misc_feature (1521)..(1521): n is a, c, g, or t
  misc_feature (1524)..(1524): n is a, c, g, or t
  misc_feature (1527)..(1527): n is a, c, g, or t
  misc_feature (1530)..(1530): n is a, c, g, or t
  misc_feature (1533)..(1533): n is a, c, g, or t
  misc_feature (1536)..(1536): n is a, c, g, or t
  misc_feature (1539)..(1539): n is a, c, g, or t
  misc_feature (1542)..(1542): n is a, c, g, or t
  misc_feature (1551)..(1551): n is a, c, g, or t
  misc_feature (1557)..(1557): n is a, c, g, or t
  misc_feature (1560)..(1560): n is a, c, g, or t
  misc_feature (1563)..(1563): n is a, c, g, or t
  misc_feature (1566)..(1566): n is a, c, g, or t
  misc_feature (1569)..(1569): n is a, c, g, or t
  misc_feature (1572)..(1572): n is a, c, g, or t
  misc_feature (1578)..(1578): n is a, c, g, or t
  misc_feature (1581)..(1581): n is a, c, g, or t
  misc_feature (1584)..(1584): n is a, c, g, or t
  misc_feature (1587)..(1587): n is a, c, g, or t
  misc_feature (1590)..(1590): n is a, c, g, or t
  misc_feature (1596)..(1596): n is a, c, g, or t
  misc_feature (1602)..(1602): n is a, c, g, or t
  misc_feature (1605)..(1605): n is a, c, g, or t
  misc_feature (1608)..(1608): n is a, c, g, or t
  misc_feature (1611)..(1611): n is a, c, g, or t
  misc_feature (1614)..(1614): n is a, c, g, or t
  misc_feature (1617)..(1617): n is a, c, g, or t
  misc_feature (1620)..(1620): n is a, c, g, or t
  misc_feature (1623)..(1623): n is a, c, g, or t
  misc_feature (1626)..(1626): n is a, c, g, or t
  misc_feature (1632)..(1632): n is a, c, g, or t
  misc_feature (1635)..(1635): n is a, c, g, or t
  misc_feature (1638)..(1638): n is a, c, g, or t
  misc_feature (1641)..(1641): n is a, c, g, or t
  misc_feature (1647)..(1647): n is a, c, g, or t
  misc_feature (1650)..(1650): n is a, c, g, or t
  misc_feature (1656)..(1656): n is a, c, g, or t
  misc_feature (1659)..(1659): n is a, c, g, or t
  misc_feature (1662)..(1662): n is a, c, g, or t
  misc_feature (1668)..(1668): n is a, c, g, or t
  misc_feature (1671)..(1671): n is a, c, g, or t
  misc_feature (1674)..(1674): n is a, c, g, or t
  misc_feature (1677)..(1677): n is a, c, g, or t
  misc_feature (1680)..(1680): n is a, c, g, or t
  misc_feature (1683)..(1683): n is a, c, g, or t
  misc_feature (1686)..(1686): n is a, c, g, or t
  misc_feature (1695)..(1695): n is a, c, g, or t
  misc_feature (1698)..(1698): n is a, c, g, or t
  misc_feature (1701)..(1701): n is a, c, g, or t
  misc_feature (1704)..(1704): n is a, c, g, or t
  misc_feature (1707)..(1707): n is a, c, g, or t
  misc_feature (1710)..(1710): n is a, c, g, or t
  misc_feature (1713)..(1713): n is a, c, g, or t
  misc_feature (1716)..(1716): n is a, c, g, or t
  misc_feature (1719)..(1719): n is a, c, g, or t
  misc_feature (1722)..(1722): n is a, c, g, or t
  misc_feature (1725)..(1725): n is a, c, g, or t
  misc_feature (1728)..(1728): n is a, c, g, or t
  misc_feature (1731)..(1731): n is a, c, g, or t
  misc_feature (1737)..(1737): n is a, c, g, or t
  misc_feature (1740)..(1740): n is a, c, g, or t
  misc_feature (1749)..(1749): n is a, c, g, or t
  misc_feature (1755)..(1755): n is a, c, g, or t
  misc_feature (1758)..(1758): n is a, c, g, or t
  misc_feature (1761)..(1761): n is a, c, g, or t
  misc_feature (1767)..(1767): n is a, c, g, or t
  misc_feature (1776)..(1776): n is a, c, g, or t
  misc_feature (1782)..(1782): n is a, c, g, or t
  misc_feature (1785)..(1785): n is a, c, g, or t
  misc_feature (1791)..(1791): n is a, c, g, or t
  misc_feature (1794)..(1794): n is a, c, g, or t
  misc_feature (1803)..(1803): n is a, c, g, or t
  misc_feature (1806)..(1806): n is a, c, g, or t
  misc_feature (1812)..(1812): n is a, c, g, or t
  misc_feature (1821)..(1821): n is a, c, g, or t
  misc_feature (1827)..(1827): n is a, c, g, or t
  misc_feature (1830)..(1830): n is a, c, g, or t
  misc_feature (1833)..(1833): n is a, c, g, or t
  misc_feature (1836)..(1836): n is a, c, g, or t
  misc_feature (1839)..(1839): n is a, c, g, or t
  misc_feature (1842)..(1842): n is a, c, g, or t
  misc_feature (1848)..(1848): n is a, c, g, or t
  misc_feature (1851)..(1851): n is a, c, g, or t
  misc_feature (1857)..(1857): n is a, c, g, or t
  misc_feature (1860)..(1860): n is a, c, g, or t
  misc_feature (1866)..(1866): n is a, c, g, or t
  misc_feature (1872)..(1872): n is a, c, g, or t
  misc_feature (1875)..(1875): n is a, c, g, or t
  misc_feature (1878)..(1878): n is a, c, g, or t
  misc_feature (1881)..(1881): n is a, c, g, or t
  misc_feature (1884)..(1884): n is a, c, g, or t
  misc_feature (1890)..(1890): n is a, c, g, or t
  misc_feature (1893)..(1893): n is a, c, g, or t
  misc_feature (1896)..(1896): n is a, c, g, or t
  misc_feature (1902)..(1902): n is a, c, g, or t
  misc_feature (1905)..(1905): n is a, c, g, or t
  misc_feature (1908)..(1908): n is a, c, g, or t
  misc_feature (1911)..(1911): n is a, c, g, or t
  misc_feature (1914)..(1914): n is a, c, g, or t
  misc_feature (1917)..(1917): n is a, c, g, or t
  misc_feature (1920)..(1920): n is a, c, g, or t
  misc_feature (1923)..(1923): n is a, c, g, or t
  misc_feature (1926)..(1926): n is a, c, g, or t
  misc_feature (1929)..(1929): n is a, c, g, or t
  misc_feature (1932)..(1932): n is a, c, g, or t
  misc_feature (1935)..(1935): n is a, c, g, or t
  misc_feature (1938)..(1938): n is a, c, g, or t
  misc_feature (1944)..(1944): n is a, c, g, or t
  misc_feature (1950)..(1950): n is a, c, g, or t
  misc_feature (1953)..(1953): n is a, c, g, or t
  misc_feature (1956)..(1956): n is a, c, g, or t
  misc_feature (1959)..(1959): n is a, c, g, or t
  misc_feature (1962)..(1962): n is a, c, g, or t
  misc_feature (1965)..(1965): n is a, c, g, or t
  misc_feature (1968)..(1968): n is a, c, g, or t
  misc_feature (1971)..(1971): n is a, c, g, or t
  misc_feature (1974)..(1974): n is a, c, g, or t
  misc_feature (1980)..(1980): n is a, c, g, or t
  misc_feature (1986)..(1986): n is a, c, g, or t
  misc_feature (1989)..(1989): n is a, c, g, or t
  misc_feature (1995)..(1995): n is a, c, g, or t
  misc_feature (1998)..(1998): n is a, c, g, or t
  misc_feature (2001)..(2001): n is a, c, g, or t
  misc_feature (2007)..(2007): n is a, c, g, or t
  misc_feature (2016)..(2016): n is a, c, g, or t
  misc_feature (2019)..(2019): n is a, c, g, or t
  misc_feature (2022)..(2022): n is a, c, g, or t
  misc_feature (2025)..(2025): n is a, c, g, or t
  misc_feature (2031)..(2031): n is a, c, g, or t
  misc_feature (2034)..(2034): n is a, c, g, or t
  misc_feature (2037)..(2037): n is a, c, g, or t
  misc_feature (2040)..(2040): n is a, c, g, or t
  misc_feature (2043)..(2043): n is a, c, g, or t
  misc_feature (2049)..(2049): n is a, c, g, or t
  misc_feature (2052)..(2052): n is a, c, g, or t
  misc_feature (2055)..(2055): n is a, c, g, or t
  misc_feature (2058)..(2058): n is a, c, g, or t
  misc_feature (2061)..(2061): n is a, c, g, or t
  misc_feature (2067)..(2067): n is a, c, g, or t
  misc_feature (2073)..(2073): n is a, c, g, or t
  misc_feature (2076)..(2076): n is a, c, g, or t
  misc_feature (2079)..(2079): n is a, c, g, or t
  misc_feature (2085)..(2085): n is a, c, g, or t
  misc_feature (2088)..(2088): n is a, c, g, or t
  misc_feature (2091)..(2091): n is a, c, g, or t
  misc_feature (2100)..(2100): n is a, c, g, or t
  misc_feature (2103)..(2103): n is a, c, g, or t
  misc_feature (2106)..(2106): n is a, c, g, or t
  misc_feature (2109)..(2109): n is a, c, g, or t
  misc_feature (2112)..(2112): n is a, c, g, or t
  misc_feature (2121)..(2121): n is a, c, g, or t
  misc_feature (2127)..(2127): n is a, c, g, or t
  misc_feature (2139)..(2139): n is a, c, g, or t
  misc_feature (2142)..(2142): n is a, c, g, or t
  misc_feature (2145)..(2145): n is a, c, g, or t
  misc_feature (2148)..(2148): n is a, c, g, or t
  misc_feature (2154)..(2154): n is a, c, g, or t
  misc_feature (2157)..(2157): n is a, c, g, or t
  misc_feature (2160)..(2160): n is a, c, g, or t
  misc_feature (2163)..(2163): n is a, c, g, or t
  misc_feature (2169)..(2169): n is a, c, g, or t
  misc_feature (2172)..(2172): n is a, c, g, or t
  misc_feature (2175)..(2175): n is a, c, g, or t
  misc_feature (2178)..(2178): n is a, c, g, or t
  misc_feature (2181)..(2181): n is a, c, g, or t
  misc_feature (2187)..(2187): n is a, c, g, or t
  misc_feature (2193)..(2193): n is a, c, g, or t
  misc_feature (2196)..(2196): n is a, c, g, or t
  misc_feature (2205)..(2205): n is a, c, g, or t
  misc_feature (2208)..(2208): n is a, c, g, or t
  misc_feature (2211)..(2211): n is a, c, g, or t
  misc_feature (2214)..(2214): n is a, c, g, or t
  misc_feature (2223)..(2223): n is a, c, g, or t
  misc_feature (2226)..(2226): n is a, c, g, or t
  misc_feature (2232)..(2232): n is a, c, g, or t
  misc_feature (2238)..(2238): n is a, c, g, or t
  misc_feature (2241)..(2241): n is a, c, g, or t
  misc_feature (2247)..(2247): n is a, c, g, or t
  misc_feature (2250)..(2250): n is a, c, g, or t
  misc_feature (2253)..(2253): n is a, c, g, or t
  misc_feature (2259)..(2259): n is a, c, g, or t
  misc_feature (2265)..(2265): n is a, c, g, or t
  misc_feature (2268)..(2268): n is a, c, g, or t
  misc_feature (2274)..(2274): n is a, c, g, or t
  misc_feature (2277)..(2277): n is a, c, g, or t
  misc_feature (2280)..(2280): n is a, c, g, or t
  misc_feature (2286)..(2286): n is a, c, g, or t
  misc_feature (2289)..(2289): n is a, c, g, or t
  misc_feature (2292)..(2292): n is a, c, g, or t
  misc_feature (2295)..(2295): n is a, c, g, or t
  misc_feature (2298)..(2298): n is a, c, g, or t
  misc_feature (2301)..(2301): n is a, c, g, or t
  misc_feature (2304)..(2304): n is a, c, g, or t
  misc_feature (2307)..(2307): n is a, c, g, or t
  misc_feature (2313)..(2313): n is a, c, g, or t
  misc_feature (2316)..(2316): n is a, c, g, or t
  misc_feature (2319)..(2319): n is a, c, g, or t
  misc_feature (2322)..(2322): n is a, c, g, or t
  misc_feature (2325)..(2325): n is a, c, g, or t
  misc_feature (2328)..(2328): n is a, c, g, or t
  misc_feature (2331)..(2331): n is a, c, g, or t
  misc_feature (2334)..(2334): n is a, c, g, or t
  misc_feature (2337)..(2337): n is a, c, g, or t
  misc_feature (2340)..(2340): n is a, c, g, or t
  misc_feature (2343)..(2343): n is a, c, g, or t
  misc_feature (2349)..(2349): n is a, c, g, or t
  misc_feature (2352)..(2352): n is a, c, g, or t
  misc_feature (2358)..(2358): n is a, c, g, or t
  misc_feature (2361)..(2361): n is a, c, g, or t
  misc_feature (2367)..(2367): n is a, c, g, or t
  misc_feature (2370)..(2370): n is a, c, g, or t
  misc_feature (2373)..(2373): n is a, c, g, or t
  misc_feature (2376)..(2376): n is a, c, g, or t
  misc_feature (2379)..(2379): n is a, c, g, or t
  misc_feature (2382)..(2382): n is a, c, g, or t
  misc_feature (2385)..(2385): n is a, c, g, or t
  misc_feature (2388)..(2388): n is a, c, g, or t
  misc_feature (2391)..(2391): n is a, c, g, or t
  misc_feature (2394)..(2394): n is a, c, g, or t
  misc_feature (2397)..(2397): n is a, c, g, or t
  misc_feature (2403)..(2403): n is a, c, g, or t
  misc_feature (2406)..(2406): n is a, c, g, or t
  misc_feature (2409)..(2409): n is a, c, g, or t
  misc_feature (2412)..(2412): n is a, c, g, or t
  misc_feature (2415)..(2415): n is a, c, g, or t
  misc_feature (2421)..(2421): n is a, c, g, or t
  misc_feature (2424)..(2424): n is a, c, g, or t
  misc_feature (2430)..(2430): n is a, c, g, or t
  misc_feature (2433)..(2433): n is a, c, g, or t
  misc_feature (2442)..(2442): n is a, c, g, or t
  misc_feature (2448)..(2448): n is a, c, g, or t
  misc_feature (2451)..(2451): n is a, c, g, or t
  misc_feature (2460)..(2460): n is a, c, g, or t
  misc_feature (2463)..(2463): n is a, c, g, or t
  misc_feature (2469)..(2469): n is a, c, g, or t
  misc_feature (2472)..(2472): n is a, c, g, or t
  misc_feature (2475)..(2475): n is a, c, g, or t
  misc_feature (2478)..(2478): n is a, c, g, or t
  misc_feature (2481)..(2481): n is a, c, g, or t
  misc_feature (2484)..(2484): n is a, c, g, or t
  misc_feature (2487)..(2487): n is a, c, g, or t
  misc_feature (2490)..(2490): n is a, c, g, or t
  misc_feature (2493)..(2493): n is a, c, g, or t
  misc_feature (2496)..(2496): n is a, c, g, or t
  misc_feature (2499)..(2499): n is a, c, g, or t
  misc_feature (2502)..(2502): n is a, c, g, or t
  misc_feature (2505)..(2505): n is a, c, g, or t
  misc_feature (2508)..(2508): n is a, c, g, or t
  misc_feature (2511)..(2511): n is a, c, g, or t
  misc_feature (2514)..(2514): n is a, c, g, or t
  misc_feature (2517)..(2517): n is a, c, g, or t
  misc_feature (2523)..(2523): n is a, c, g, or t
  misc_feature (2526)..(2526): n is a, c, g, or t
  misc_feature (2529)..(2529): n is a, c, g, or t
  misc_feature (2538)..(2538): n is a, c, g, or t
  misc_feature (2541)..(2541): n is a, c, g, or t
  misc_feature (2544)..(2544): n is a, c, g, or t
  misc_feature (2547)..(2547): n is a, c, g, or t
  misc_feature (2550)..(2550): n is a, c, g, or t
  misc_feature (2553)..(2553): n is a, c, g, or t
  misc_feature (2556)..(2556): n is a, c, g, or t
  misc_feature (2565)..(2565): n is a, c, g, or t
  misc_feature (2568)..(2568): n is a, c, g, or t
  misc_feature (2571)..(2571): n is a, c, g, or t
  misc_feature (2574)..(2574): n is a, c, g, or t
  misc_feature (2577)..(2577): n is a, c, g, or t
  misc_feature (2583)..(2583): n is a, c, g, or t
  misc_feature (2586)..(2586): n is a, c, g, or t
  misc_feature (2592)..(2592): n is a, c, g, or t
  misc_feature (2598)..(2598): n is a, c, g, or t
  misc_feature (2601)..(2601): n is a, c, g, or t
  misc_feature (2604)..(2604): n is a, c, g, or t
  misc_feature (2610)..(2610): n is a, c, g, or t
  misc_feature (2619)..(2619): n is a, c, g, or t
  misc_feature (2622)..(2622): n is a, c, g, or t
  misc_feature (2628)..(2628): n is a, c, g, or t
  misc_feature (2634)..(2634): n is a, c, g, or t
  misc_feature (2637)..(2637): n is a, c, g, or t
  misc_feature (2640)..(2640): n is a, c, g, or t
  misc_feature (2643)..(2643): n is a, c, g, or t
  misc_feature (2646)..(2646): n is a, c, g, or t
  misc_feature (2655)..(2655): n is a, c, g, or t
  misc_feature (2661)..(2661): n is a, c, g, or t
  misc_feature (2664)..(2664): n is a, c, g, or t
  misc_feature (2670)..(2670): n is a, c, g, or t
  misc_feature (2673)..(2673): n is a, c, g, or t
  misc_feature (2676)..(2676): n is a, c, g, or t
  misc_feature (2679)..(2679): n is a, c, g, or t
  misc_feature (2682)..(2682): n is a, c, g, or t
  misc_feature (2691)..(2691): n is a, c, g, or t
  misc_feature (2697)..(2697): n is a, c, g, or t
  misc_feature (2700)..(2700): n is a, c, g, or t
  misc_feature (2703)..(2703): n is a, c, g, or t
  misc_feature (2706)..(2706): n is a, c, g, or t
  misc_feature (2709)..(2709): n is a, c, g, or t
  misc_feature (2715)..(2715): n is a, c, g, or t
  misc_feature (2718)..(2718): n is a, c, g, or t
  misc_feature (2724)..(2724): n is a, c, g, or t
  misc_feature (2727)..(2727): n is a, c, g, or t
  misc_feature (2730)..(2730): n is a, c, g, or t
  misc_feature (2736)..(2736): n is a, c, g, or t
  misc_feature (2742)..(2742): n is a, c, g, or t
  misc_feature (2745)..(2745): n is a, c, g, or t
  misc_feature (2748)..(2748): n is a, c, g, or t
  misc_feature (2754)..(2754): n is a, c, g, or t
  misc_feature (2757)..(2757): n is a, c, g, or t
  misc_feature (2760)..(2760): n is a, c, g, or t
  misc_feature (2763)..(2763): n is a, c, g, or t
  misc_feature (2766)..(2766): n is a, c, g, or t
  misc_feature (2769)..(2769): n is a, c, g, or t
  misc_feature (2772)..(2772): n is a, c, g, or t
  misc_feature (2775)..(2775): n is a, c, g, or t
  misc_feature (2778)..(2778): n is a, c, g, or t
  misc_feature (2781)..(2781): n is a, c, g, or t
  misc_feature (2784)..(2784): n is a, c, g, or t
  misc_feature (2790)..(2790): n is a, c, g, or t
  misc_feature (2796)..(2796): n is a, c, g, or t
  misc_feature (2799)..(2799): n is a, c, g, or t
  misc_feature (2802)..(2802): n is a, c, g, or t
  misc_feature (2805)..(2805): n is a, c, g, or t
  misc_feature (2808)..(2808): n is a, c, g, or t
  misc_feature (2811)..(2811): n is a, c, g, or t
  misc_feature (2814)..(2814): n is a, c, g, or t
  misc_feature (2817)..(2817): n is a, c, g, or t
  misc_feature (2820)..(2820): n is a, c, g, or t
  misc_feature (2823)..(2823): n is a, c, g, or t
  misc_feature (2826)..(2826): n is a, c, g, or t
  misc_feature (2829)..(2829): n is a, c, g, or t
  misc_feature (2832)..(2832): n is a, c, g, or t
  misc_feature (2835)..(2835): n is a, c, g, or t
  misc_feature (2838)..(2838): n is a, c, g, or t
  misc_feature (2844)..(2844): n is a, c, g, or t
  misc_feature (2847)..(2847): n is a, c, g, or t
  misc_feature (2850)..(2850): n is a, c, g, or t
  misc_feature (2853)..(2853): n is a, c, g, or t
  misc_feature (2856)..(2856): n is a, c, g, or t
  misc_feature (2862)..(2862): n is a, c, g, or t
  misc_feature (2868)..(2868): n is a, c, g, or t
  misc_feature (2871)..(2871): n is a, c, g, or t
  misc_feature (2877)..(2877): n is a, c, g, or t
  misc_feature (2880)..(2880): n is a, c, g, or t
  misc_feature (2883)..(2883): n is a, c, g, or t
  misc_feature (2886)..(2886): n is a, c, g, or t
  misc_feature (2889)..(2889): n is a, c, g, or t
  misc_feature (2892)..(2892): n is a, c, g, or t
  misc_feature (2895)..(2895): n is a, c, g, or t
  misc_feature (2898)..(2898): n is a, c, g, or t
  misc_feature (2901)..(2901): n is a, c, g, or t
  misc_feature (2904)..(2904): n is a, c, g, or t
  misc_feature (2907)..(2907): n is a, c, g, or t
  misc_feature (2910)..(2910): n is a, c, g, or t
  misc_feature (2913)..(2913): n is a, c, g, or t
  misc_feature (2916)..(2916): n is a, c, g, or t
  misc_feature (2919)..(2919): n is a, c, g, or t
  misc_feature (2922)..(2922): n is a, c, g, or t
  misc_feature (2925)..(2925): n is a, c, g, or t
  misc_feature (2928)..(2928): n is a, c, g, or t
  misc_feature (2931)..(2931): n is a, c, g, or t
  misc_feature (2934)..(2934): n is a, c, g, or t
  misc_feature (2937)..(2937): n is a, c, g, or t
  misc_feature (2940)..(2940): n is a, c, g, or t
  misc_feature (2943)..(2943): n is a, c, g, or t
  misc_feature (2946)..(2946): n is a, c, g, or t
  misc_feature (2949)..(2949): n is a, c, g, or t
  misc_feature (2952)..(2952): n is a, c, g, or t
  misc_feature (2955)..(2955): n is a, c, g, or t
  misc_feature (2958)..(2958): n is a, c, g, or t
  misc_feature (2961)..(2961): n is a, c, g, or t
  misc_feature (2967)..(2967): n is a, c, g, or t
  misc_feature (2970)..(2970): n is a, c, g, or t
  misc_feature (2973)..(2973): n is a, c, g, or t
  misc_feature (2976)..(2976): n is a, c, g, or t
  misc_feature (2979)..(2979): n is a, c, g, or t
  misc_feature (2982)..(2982): n is a, c, g, or t
  misc_feature (2985)..(2985): n is a, c, g, or t
  misc_feature (2991)..(2991): n is a, c, g, or t
  misc_feature (2994)..(2994): n is a, c, g, or t
  misc_feature (3000)..(3000): n is a, c, g, or t
  misc_feature (3003)..(3003): n is a, c, g, or t
  misc_feature (3009)..(3009): n is a, c, g, or t
  misc_feature (3012)..(3012): n is a, c, g, or t
  misc_feature (3015)..(3015): n is a, c, g, or t
  misc_feature (3018)..(3018): n is a, c, g, or t
  misc_feature (3021)..(3021): n is a, c, g, or t
  misc_feature (3024)..(3024): n is a, c, g, or t
  misc_feature (3030)..(3030): n is a, c, g, or t
  misc_feature (3033)..(3033): n is a, c, g, or t
  misc_feature (3036)..(3036): n is a, c, g, or t
  misc_feature (3039)..(3039): n is a, c, g, or t
  misc_feature (3048)..(3048): n is a, c, g, or t
  misc_feature (3054)..(3054): n is a, c, g, or t
  misc_feature (3057)..(3057): n is a, c, g, or t
  misc_feature (3060)..(3060): n is a, c, g, or t
  misc_feature (3063)..(3063): n is a, c, g, or t
  misc_feature (3066)..(3066): n is a, c, g, or t
  misc_feature (3069)..(3069): n is a, c, g, or t
  misc_feature (3072)..(3072): n is a, c, g, or t
  misc_feature (3075)..(3075): n is a, c, g, or t
  misc_feature (3078)..(3078): n is a, c, g, or t
  misc_feature (3081)..(3081): n is a, c, g, or t
  misc_feature (3084)..(3084): n is a, c, g, or t
  misc_feature (3087)..(3087): n is a, c, g, or t
  misc_feature (3090)..(3090): n is a, c, g, or t
  misc_feature (3093)..(3093): n is a, c, g, or t
  misc_feature (3096)..(3096): n is a, c, g, or t
  misc_feature (3099)..(3099): n is a, c, g, or t
  misc_feature (3102)..(3102): n is a, c, g, or t
  misc_feature (3105)..(3105): n is a, c, g, or t
  misc_feature (3111)..(3111): n is a, c, g, or t
  misc_feature (3117)..(3117): n is a, c, g, or t
  misc_feature (3120)..(3120): n is a, c, g, or t
  misc_feature (3123)..(3123): n is a, c, g, or t
  misc_feature (3126)..(3126): n is a, c, g, or t
  misc_feature (3129)..(3129): n is a, c, g, or t
  misc_feature (3132)..(3132): n is a, c, g, or t
  misc_feature (3135)..(3135): n is a, c, g, or t
  misc_feature (3138)..(3138): n is a, c, g, or t
  misc_feature (3144)..(3144): n is a, c, g, or t
  misc_feature (3147)..(3147): n is a, c, g, or t
  misc_feature (3150)..(3150): n is a, c, g, or t
  misc_feature (3153)..(3153): n is a, c, g, or t
  misc_feature (3156)..(3156): n is a, c, g, or t
  misc_feature (3159)..(3159): n is a, c, g, or t
  misc_feature (3162)..(3162): n is a, c, g, or t
  misc_feature (3165)..(3165): n is a, c, g, or t
  misc_feature (3171)..(3171): n is a, c, g, or t
  misc_feature (3180)..(3180): n is a, c, g, or t
  misc_feature (3183)..(3183): n is a, c, g, or t
  misc_feature (3186)..(3186): n is a, c, g, or t
  misc_feature (3189)..(3189): n is a, c, g, or t
  misc_feature (3192)..(3192): n is a, c, g, or t
  misc_feature (3195)..(3195): n is a, c, g, or t
  misc_feature (3198)..(3198): n is a, c, g, or t
  misc_feature (3201)..(3201): n is a, c, g, or t
  misc_feature (3207)..(3207): n is a, c, g, or t
  misc_feature (3210)..(3210): n is a, c, g, or t
  misc_feature (3213)..(3213): n is a, c, g, or t
  misc_feature (3219)..(3219): n is a, c, g, or t
  misc_feature (3222)..(3222): n is a, c, g, or t
  misc_feature (3225)..(3225): n is a, c, g, or t
  misc_feature (3231)..(3231): n is a, c, g, or t
  misc_feature (3237)..(3237): n is a, c, g, or t
  misc_feature (3240)..(3240): n is a, c, g, or t
  misc_feature (3243)..(3243): n is a, c, g, or t
  misc_feature (3246)..(3246): n is a, c, g, or t
  misc_feature (3249)..(3249): n is a, c, g, or t
  misc_feature (3252)..(3252): n is a, c, g, or t
  misc_feature (3255)..(3255): n is a, c, g, or t
  misc_feature (3258)..(3258): n is a, c, g, or t
  misc_feature (3267)..(3267): n is a, c, g, or t
  misc_feature (3273)..(3273): n is a, c, g, or t
  misc_feature (3276)..(3276): n is a, c, g, or t
  misc_feature (3279)..(3279): n is a, c, g, or t
  misc_feature (3282)..(3282): n is a, c, g, or t
  misc_feature (3285)..(3285): n is a, c, g, or t
  misc_feature (3291)..(3291): n is a, c, g, or t
  misc_feature (3294)..(3294): n is a, c, g, or t
  misc_feature (3300)..(3300): n is a, c, g, or t
  misc_feature (3303)..(3303): n is a, c, g, or t
  misc_feature (3312)..(3312): n is a, c, g, or t
  misc_feature (3321)..(3321): n is a, c, g, or t
  misc_feature (3324)..(3324): n is a, c, g, or t
  misc_feature (3327)..(3327): n is a, c, g, or t
  misc_feature (3330)..(3330): n is a, c, g, or t
  misc_feature (3333)..(3333): n is a, c, g, or t
  misc_feature (3339)..(3339): n is a, c, g, or t
  misc_feature (3348)..(3348): n is a, c, g, or t
  misc_feature (3354)..(3354): n is a, c, g, or t
  misc_feature (3357)..(3357): n is a, c, g, or t
  misc_feature (3360)..(3360): n is a, c, g, or t
  misc_feature (3363)..(3363): n is a, c, g, or t
  misc_feature (3366)..(3366): n is a, c, g, or t
  misc_feature (3369)..(3369): n is a, c, g, or t
  misc_feature (3372)..(3372): n is a, c, g, or t
  misc_feature (3375)..(3375): n is a, c, g, or t
  misc_feature (3378)..(3378): n is a, c, g, or t
  misc_feature (3381)..(3381): n is a, c, g, or t
  misc_feature (3384)..(3384): n is a, c, g, or t
  misc_feature (3387)..(3387): n is a, c, g, or t
  misc_feature (3390)..(3390): n is a, c, g, or t
  misc_feature (3393)..(3393): n is a, c, g, or t
  misc_feature (3396)..(3396): n is a, c, g, or t
  misc_feature (3399)..(3399): n is a, c, g, or t
  misc_feature (3402)..(3402): n is a, c, g, or t
  misc_feature (3408)..(3408): n is a, c, g, or t
  misc_feature (3414)..(3414): n is a, c, g, or t
  misc_feature (3417)..(3417): n is a, c, g, or t
  misc_feature (3420)..(3420): n is a, c, g, or t
  misc_feature (3423)..(3423): n is a, c, g, or t
  misc_feature (3426)..(3426): n is a, c, g, or t
  misc_feature (3429)..(3429): n is a, c, g, or t
  misc_feature (3432)..(3432): n is a, c, g, or t
  misc_feature (3435)..(3435): n is a, c, g, or t
  misc_feature (3438)..(3438): n is a, c, g, or t
  misc_feature (3441)..(3441): n is a, c, g, or t
  misc_feature (3444)..(3444): n is a, c, g, or t
  misc_feature (3447)..(3447): n is a, c, g, or t
  misc_feature (3450)..(3450): n is a, c, g, or t
  misc_feature (3453)..(3453): n is a, c, g, or t
  misc_feature (3459)..(3459): n is a, c, g, or t
  misc_feature (3462)..(3462): n is a, c, g, or t
  misc_feature (3468)..(3468): n is a, c, g, or t
  misc_feature (3471)..(3471): n is a, c, g, or t
  misc_feature (3474)..(3474): n is a, c, g, or t
  misc_feature (3477)..(3477): n is a, c, g, or t
  misc_feature (3480)..(3480): n is a, c, g, or t
  misc_feature (3489)..(3489): n is a, c, g, or t
  misc_feature (3495)..(3495): n is a, c, g, or t
  misc_feature (3498)..(3498): n is a, c, g, or t
  misc_feature (3501)..(3501): n is a, c, g, or t
  misc_feature (3504)..(3504): n is a, c, g, or t
  misc_feature (3507)..(3507): n is a, c, g, or t
  misc_feature (3513)..(3513): n is a, c, g, or t
  misc_feature (3516)..(3516): n is a, c, g, or t
  misc_feature (3519)..(3519): n is a, c, g, or t
  misc_feature (3522)..(3522): n is a, c, g, or t
  misc_feature (3525)..(3525): n is a, c, g, or t
  misc_feature (3528)..(3528): n is a, c, g, or t
  misc_feature (3531)..(3531): n is a, c, g, or t
  misc_feature (3534)..(3534): n is a, c, g, or t
  misc_feature (3537)..(3537): n is a, c, g, or t
  misc_feature (3543)..(3543): n is a, c, g, or t
  misc_feature (3549)..(3549): n is a, c, g, or t
  misc_feature (3552)..(3552): n is a, c, g, or t
  misc_feature (3555)..(3555): n is a, c, g, or t
  misc_feature (3558)..(3558): n is a, c, g, or t
  misc_feature (3561)..(3561): n is a, c, g, or t
  misc_feature (3564)..(3564): n is a, c, g, or t
  misc_feature (3567)..(3567): n is a, c, g, or t
  misc_feature (3570)..(3570): n is a, c, g, or t
  misc_feature (3573)..(3573): n is a, c, g, or t
  misc_feature (3576)..(3576): n is a, c, g, or t
  misc_feature (3579)..(3579): n is a, c, g, or t
  misc_feature (3582)..(3582): n is a, c, g, or t
  misc_feature (3585)..(3585): n is a, c, g, or t
  misc_feature (3588)..(3588): n is a, c, g, or t
  misc_feature (3591)..(3591): n is a, c, g, or t
  misc_feature (3594)..(3594): n is a, c, g, or t
  misc_feature (3597)..(3597): n is a, c, g, or t
  misc_feature (3600)..(3600): n is a, c, g, or t
  misc_feature (3603)..(3603): n is a, c, g, or t
  misc_feature (3606)..(3606): n is a, c, g, or t
  misc_feature (3609)..(3609): n is a, c, g, or t
  misc_feature (3615)..(3615): n is a, c, g, or t
  misc_feature (3624)..(3624): n is a, c, g, or t
  misc_feature (3630)..(3630): n is a, c, g, or t
  misc_feature (3633)..(3633): n is a, c, g, or t
  misc_feature (3636)..(3636): n is a, c, g, or t
  misc_feature (3639)..(3639): n is a, c, g, or t
  misc_feature (3642)..(3642): n is a, c, g, or t
  misc_feature (3645)..(3645): n is a, c, g, or t
  misc_feature (3648)..(3648): n is a, c, g, or t
  misc_feature (3651)..(3651): n is a, c, g, or t
  misc_feature (3654)..(3654): n is a, c, g, or t
  misc_feature (3657)..(3657): n is a, c, g, or t
  misc_feature (3663)..(3663): n is a, c, g, or t
  misc_feature (3666)..(3666): n is a, c, g, or t
  misc_feature (3672)..(3672): n is a, c, g, or t
  misc_feature (3675)..(3675): n is a, c, g, or t
  misc_feature (3681)..(3681): n is a, c, g, or t
  misc_feature (3684)..(3684): n is a, c, g, or t
  misc_feature (3693)..(3693): n is a, c, g, or t
  misc_feature (3696)..(3696): n is a, c, g, or t
  misc_feature (3699)..(3699): n is a, c, g, or t
  misc_feature (3702)..(3702): n is a, c, g, or t
  misc_feature (3711)..(3711): n is a, c, g, or t
  misc_feature (3714)..(3714): n is a, c, g, or t
  misc_feature (3717)..(3717): n is a, c, g, or t
  misc_feature (3720)..(3720): n is a, c, g, or t
  misc_feature (3723)..(3723): n is a, c, g, or t
  misc_feature (3726)..(3726): n is a, c, g, or t
  misc_feature (3729)..(3729): n is a, c, g, or t
  misc_feature (3732)..(3732): n is a, c, g, or t
  misc_feature (3735)..(3735): n is a, c, g, or t
  misc_feature (3738)..(3738): n is a, c, g, or t
  misc_feature (3741)..(3741): n is a, c, g, or t
  misc_feature (3744)..(3744): n is a, c, g, or t
  misc_feature (3747)..(3747): n is a, c, g, or t
  misc_feature (3753)..(3753): n is a, c, g, or t
  misc_feature (3756)..(3756): n is a, c, g, or t
  misc_feature (3765)..(3765): n is a, c, g, or t
  misc_feature (3771)..(3771): n is a, c, g, or t
  misc_feature (3774)..(3774): n is a, c, g, or t
  misc_feature (3777)..(3777): n is a, c, g, or t
  misc_feature (3780)..(3780): n is a, c, g, or t
  misc_feature (3783)..(3783): n is a, c, g, or t
  misc_feature (3786)..(3786): n is a, c, g, or t
  misc_feature (3792)..(3792): n is a, c, g, or t
  misc_feature (3801)..(3801): n is a, c, g, or t
  misc_feature (3807)..(3807): n is a, c, g, or t
  misc_feature (3810)..(3810): n is a, c, g, or t
  misc_feature (3813)..(3813): n is a, c, g, or t
  misc_feature (3819)..(3819): n is a, c, g, or t
  misc_feature (3822)..(3822): n is a, c, g, or t
  misc_feature (3825)..(3825): n is a, c, g, or t
  misc_feature (3828)..(3828): n is a, c, g, or t
  misc_feature (3831)..(3831): n is a, c, g, or t
  misc_feature (3834)..(3834): n is a, c, g, or t
  misc_feature (3837)..(3837): n is a, c, g, or t
  misc_feature (3840)..(3840): n is a, c, g, or t
  misc_feature (3843)..(3843): n is a, c, g, or t
  misc_feature (3849)..(3849): n is a, c, g, or t
  misc_feature (3858)..(3858): n is a, c, g, or t
  misc_feature (3864)..(3864): n is a, c, g, or t
  misc_feature (3867)..(3867): n is a, c, g, or t
  misc_feature (3870)..(3870): n is a, c, g, or t
  misc_feature (3873)..(3873): n is a, c, g, or t
  misc_feature (3876)..(3876): n is a, c, g, or t
  misc_feature (3879)..(3879): n is a, c, g, or t
  misc_feature (3885)..(3885): n is a, c, g, or t
  misc_feature (3894)..(3894): n is a, c, g, or t
  misc_feature (3897)..(3897): n is a, c, g, or t
  misc_feature (3900)..(3900): n is a, c, g, or t
  misc_feature (3903)..(3903): n is a, c, g, or t
  misc_feature (3912)..(3912): n is a, c, g, or t
  misc_feature (3918)..(3918): n is a, c, g, or t
  misc_feature (3921)..(3921): n is a, c, g, or t
  misc_feature (3930)..(3930): n is a, c, g, or t
  misc_feature (3933)..(3933): n is a, c, g, or t
  misc_feature (3939)..(3939): n is a, c, g, or t
  misc_feature (3945)..(3945): n is a, c, g, or t
  misc_feature (3948)..(3948): n is a, c, g, or t
  misc_feature (3957)..(3957): n is a, c, g, or t
  misc_feature (3960)..(3960): n is a, c, g, or t
  misc_feature (3963)..(3963): n is a, c, g, or t
  misc_feature (3966)..(3966): n is a, c, g, or t
  misc_feature (3969)..(3969): n is a, c, g, or t
  misc_feature (3972)..(3972): n is a, c, g, or t
  misc_feature (3975)..(3975): n is a, c, g, or t
  misc_feature (3978)..(3978): n is a, c, g, or t
  misc_feature (3981)..(3981): n is a, c, g, or t
  misc_feature (3984)..(3984): n is a, c, g, or t
  misc_feature (3987)..(3987): n is a, c, g, or t
  misc_feature (3990)..(3990): n is a, c, g, or t
  misc_feature (3993)..(3993): n is a, c, g, or t
  misc_feature (3996)..(3996): n is a, c, g, or t
  misc_feature (4002)..(4002): n is a, c, g, or t
  misc_feature (4008)..(4008): n is a, c, g, or t
  misc_feature (4011)..(4011): n is a, c, g, or t
  misc_feature (4014)..(4014): n is a, c, g, or t
  misc_feature (4017)..(4017): n is a, c, g, or t
  misc_feature (4020)..(4020): n is a, c, g, or t
  misc_feature (4026)..(4026): n is a, c, g, or t
  misc_feature (4029)..(4029): n is a, c, g, or t
  misc_feature (4035)..(4035): n is a, c, g, or t
  misc_feature (4038)..(4038): n is a, c, g, or t
  misc_feature (4041)..(4041): n is a, c, g, or t
  misc_feature (4044)..(4044): n is a, c, g, or t
  misc_feature (4047)..(4047): n is a, c, g, or t
  misc_feature (4056)..(4056): n is a, c, g, or t
  misc_feature (4059)..(4059): n is a, c, g, or t
  misc_feature (4062)..(4062): n is a, c, g, or t
  misc_feature (4065)..(4065): n is a, c, g, or t
  misc_feature (4071)..(4071): n is a, c, g, or t
  misc_feature (4074)..(4074): n is a, c, g, or t
  misc_feature (4083)..(4083): n is a, c, g, or t
  misc_feature (4089)..(4089): n is a, c, g, or t
  misc_feature (4092)..(4092): n is a, c, g, or t
  misc_feature (4101)..(4101): n is a, c, g, or t
  misc_feature (4104)..(4104): n is a, c, g, or t
  misc_feature (4107)..(4107): n is a, c, g, or t
  misc_feature (4110)..(4110): n is a, c, g, or t
  misc_feature (4113)..(4113): n is a, c, g, or t
  misc_feature (4119)..(4119): n is a, c, g, or t
  misc_feature (4125)..(4125): n is a, c, g, or t
  misc_feature (4128)..(4128): n is a, c, g, or t
  misc_feature (4131)..(4131): n is a, c, g, or t
  misc_feature (4137)..(4137): n is a, c, g, or t
  misc_feature (4140)..(4140): n is a, c, g, or t
  misc_feature (4146)..(4146): n is a, c, g, or t
  misc_feature (4149)..(4149): n is a, c, g, or t
  misc_feature (4155)..(4155): n is a, c, g, or t
  misc_feature (4164)..(4164): n is a, c, g, or t
  misc_feature (4173)..(4173): n is a, c, g, or t
  misc_feature (4179)..(4179): n is a, c, g, or t
  misc_feature (4182)..(4182): n is a, c, g, or t
  misc_feature (4185)..(4185): n is a, c, g, or t
  misc_feature (4188)..(4188): n is a, c, g, or t
  misc_feature (4191)..(4191): n is a, c, g, or t
  misc_feature (4194)..(4194): n is a, c, g, or t
  misc_feature (4197)..(4197): n is a, c, g, or t
  misc_feature (4200)..(4200): n is a, c, g, or t
  misc_feature (4203)..(4203): n is a, c, g, or t
  misc_feature (4206)..(4206): n is a, c, g, or t
  misc_feature (4209)..(4209): n is a, c, g, or t
  misc_feature (4218)..(4218): n is a, c, g, or t
  misc_feature (4227)..(4227): n is a, c, g, or t
  misc_feature (4233)..(4233): n is a, c, g, or t
  misc_feature (4236)..(4236): n is a, c, g, or t
  misc_feature (4239)..(4239): n is a, c, g, or t
  misc_feature (4242)..(4242): n is a, c, g, or t
  misc_feature (4245)..(4245): n is a, c, g, or t
  misc_feature (4251)..(4251): n is a, c, g, or t
  misc_feature (4254)..(4254): n is a, c, g, or t
  misc_feature (4257)..(4257): n is a, c, g, or t
  misc_feature (4260)..(4260): n is a, c, g, or t
  misc_feature (4263)..(4263): n is a, c, g, or t
  misc_feature (4272)..(4272): n is a, c, g, or t
  misc_feature (4275)..(4275): n is a, c, g, or t
  misc_feature (4281)..(4281): n is a, c, g, or t
  misc_feature (4284)..(4284): n is a, c, g, or t
  misc_feature (4290)..(4290): n is a, c, g, or t
  misc_feature (4296)..(4296): n is a, c, g, or t
  misc_feature (4299)..(4299): n is a, c, g, or t
  misc_feature (4308)..(4308): n is a, c, g, or t
  misc_feature (4314)..(4314): n is a, c, g, or t
  misc_feature (4317)..(4317): n is a, c, g, or t
  misc_feature (4320)..(4320): n is a, c, g, or t
  misc_feature (4326)..(4326): n is a, c, g, or t
  misc_feature (4335)..(4335): n is a, c, g, or t
  misc_feature (4344)..(4344): n is a, c, g, or t
  misc_feature (4350)..(4350): n is a, c, g, or t
  misc_feature (4353)..(4353): n is a, c, g, or t
  misc_feature (4356)..(4356): n is a, c, g, or t
  misc_feature (4359)..(4359): n is a, c, g, or t
  misc_feature (4362)..(4362): n is a, c, g, or t
  misc_feature (4368)..(4368): n is a, c, g, or t
  misc_feature (4371)..(4371): n is a, c, g, or t
  misc_feature (4377)..(4377): n is a, c, g, or t
  misc_feature (4380)..(4380): n is a, c, g, or t
  misc_feature (4383)..(4383): n is a, c, g, or t
  misc_feature (4386)..(4386): n is a, c, g, or t
  misc_feature (4389)..(4389): n is a, c, g, or t
  misc_feature (4398)..(4398): n is a, c, g, or t
  misc_feature (4401)..(4401): n is a, c, g, or t
  misc_feature (4404)..(4404): n is a, c, g, or t
  misc_feature (4407)..(4407): n is a, c, g, or t
  misc_feature (4410)..(4410): n is a, c, g, or t
  misc_feature (4413)..(4413): n is a, c, g, or t
  misc_feature (4416)..(4416): n is a, c, g, or t
  misc_feature (4419)..(4419): n is a, c, g, or t
  misc_feature (4422)..(4422): n is a, c, g, or t
  misc_feature (4425)..(4425): n is a, c, g, or t
  misc_feature (4428)..(4428): n is a, c, g, or t
  misc_feature (4431)..(4431): n is a, c, g, or t
  misc_feature (4434)..(4434): n is a, c, g, or t
  misc_feature (4437)..(4437): n is a, c, g, or t
  misc_feature (4440)..(4440): n is a, c, g, or t
  misc_feature (4443)..(4443): n is a, c, g, or t
  misc_feature (4446)..(4446): n is a, c, g, or t
  misc_feature (4452)..(4452): n is a, c, g, or t
  misc_feature (4455)..(4455): n is a, c, g, or t
  misc_feature (4461)..(4461): n is a, c, g, or t
  misc_feature (4470)..(4470): n is a, c, g, or t
  misc_feature (4476)..(4476): n is a, c, g, or t
  misc_feature (4479)..(4479): n is a, c, g, or t
  misc_feature (4482)..(4482): n is a, c, g, or t
  misc_feature (4485)..(4485): n is a, c, g, or t
  misc_feature (4488)..(4488): n is a, c, g, or t
  misc_feature (4494)..(4494): n is a, c, g, or t
  misc_feature (4497)..(4497): n is a, c, g, or t
  misc_feature (4500)..(4500): n is a, c, g, or t
  misc_feature (4503)..(4503): n is a, c, g, or t
  misc_feature (4506)..(4506): n is a, c, g, or t
  misc_feature (4509)..(4509): n is a, c, g, or t
  misc_feature (4512)..(4512): n is a, c, g, or t
  misc_feature (4515)..(4515): n is a, c, g, or t
  misc_feature (4518)..(4518): n is a, c, g, or t
  misc_feature (4521)..(4521): n is a, c, g, or t
  misc_feature (4524)..(4524): n is a, c, g, or t
  misc_feature (4527)..(4527): n is a, c, g, or t
  misc_feature (4530)..(4530): n is a, c, g, or t
  misc_feature (4536)..(4536): n is a, c, g, or t
  misc_feature (4539)..(4539): n is a, c, g, or t
  misc_feature (4548)..(4548): n is a, c, g, or t
  misc_feature (4551)..(4551): n is a, c, g, or t
  misc_feature (4554)..(4554): n is a, c, g, or t
  misc_feature (4557)..(4557): n is a, c, g, or t
  misc_feature (4560)..(4560): n is a, c, g, or t
  misc_feature (4563)..(4563): n is a, c, g, or t
  misc_feature (4566)..(4566): n is a, c, g, or t
  misc_feature (4569)..(4569): n is a, c, g, or t
  misc_feature (4572)..(4572): n is a, c, g, or t
  misc_feature (4575)..(4575): n is a, c, g, or t
  misc_feature (4584)..(4584): n is a, c, g, or t
  misc_feature (4590)..(4590): n is a, c, g, or t
ggncaraarggngarccnggngaratgggnytnmgnggncargtnggnccnccnggngayccnggnytnccnggnmgnacnggngcnccnggnccncarggnccnccnggnwsngcnacngcnaarggngarmgnggnttyccnggngcngayggnmgnccnggnwsnccnggnmgngcnggnaayccnggnacnccnggngcnccnggnytnaarggnwsnccnggnytnccnggnccnmgnggngayccnggngarmgnggnccnmgnggnccnaarggngarccnggngcnccnggncargtnathggnggngarggnccnggnytnccnggnmgnaarggngayccnggnccnwsnggnccnccnggnccnmgnggnccnytnggngayccnggnccnmgnggnccnccnggnytnccnggnacngcnatgaarggngayaarggngaymgnggngarmgnggnccnccnggnccnggngarggnggnathgcnccnggngarccnggnytnccnggnytnccnggnwsnccnggnccncarggnccngtnggnccnccnggnaaraarggngaraarggngaywsngargayggngcnccnggnytnccnggncarccnggnwsnccnggngarcarggnccnmgnggnccnccnggngcnathggnccnaarggngaymgnggnttyccnggnccnytnggngargcnggngaraarggngarmgnggnccnccnggnccngcnggnwsnmgnggnytnccnggngtngcnggnmgnccnggngcnaarggnccngarggnccnccnggnccnacnggnmgncarggngaraarggngarccnggnmgnccnggngayccngcngtngtnggnccngcngtngcnggnccnaarggngaraarggngaygtnggnccngcnggnccnmgnggngcnacnggngtncarggngarmgnggnccnccnggnytngtnytnccnggngayccnggnccnaarggngayccnggngaymgnggnccnathggnytnacnggnmgngcnggnccnccnggngaywsnggnccnccnggngaraarggngayccnggnmgnccnggnccnccnggnccngtnggnccnmgnggnmgngayggngargtnggngaraarggngaygarggnccnccnggngayccnggnytnccnggnaargcnggngarmgnggnytnmgnggngcnccnggngtnmgnggnccngtnggngaraarggngaycarggngayccnggngargayggnmgnaayggnwsnccnggnwsnwsnggnccnaarggngaymgnggngarccnggnccnccnggnccnccnggnmgnytngtngayacnggnccnggngcnmgngaraarggngarccnggngaymgnggncargarggnccnmgnggnccnaarggngayccnggnytnccnggngcnccnggngarmgnggnathgarggnttymgnggnccnccnggnccncarggngayccnggngtnmgnggnccngcnggngaraarggngaymgnggnccnccnggnytngayggnmgnwsnggnytngayggnaarccnggngcngcnggnccnwsnggnccnaayggngcngcnggnaargcnggngayccnggnmgngayggnytnccnggnytnmgnggngarcarggnytnccnggnccnwsnggnccnccnggnytnccnggnaarccnggngargayggnaarccnggnytnaayggnaaraayggngarccnggngayccnggngargayggnmgnaarggngaraarggngaywsnggngcnwsnggnmgngarggnmgngayggnccnaarggngarmgnggngcnccnggnathytnggnccncarggnccnccnggnytnccnggnccngtnggnccnccnggncarggnttyccnggngtnccnggnggnacnggnccnaarggngaymgnggngaracnggnwsnaarggngarcarggnytnccnggngarmgnggnytnmgnggngarccnggnwsngtnccnaaygtngaymgnytnytngaracngcnggnathaargcnwsngcnytnmgngarathgtngaracntgggaygarwsnwsnggnwsnttyytnccngtnccngarmgnmgnmgnggnccnaarggngaywsnggngarcarggnccnccnggnaargarggnccnathggnttyccnggngarmgnggnytnaarggngaymgnggngayccnggnccncarggnccnccnggnytngcnytnggngarmgnggnccnccnggnccnwsnggnytngcnggngarccnggnaarccnggnathccnggnytnccnggnmgngcnggnggngtnggngargcnggnmgnccnggngarmgnggngarmgnggngaraarggngarmgnggngarcarggnmgngayggnccnccnggnytnccnggnacnccnggnccnccnggnccnccnggnccnaargtnwsngtngaygarccnggnccnggnytnwsnggngarcarggnccnccnggnytnaarggngcnaarggngarccnggnwsnaayggngaycarggnccnaarggngaymgnggngtnccnggnathaarggngaymgnggngarccnggnccnmgnggncargayggnaayccnggnytnccnggngarmgnggnatggcnggnccngarggnaarccnggnytncarggnccnmgnggnccnccnggnccngtnggnggncayggngayccnggnccnccnggngcnccnggnytngcnggnccngcnggnccncarggnccnwsnggnytnaarggngarccnggngaracnggnccnccnggnmgnggnytnacnggnccnacnggngcngtnggnytnccnggnccnccnggnccnwsnggnytngtnggnccncarggnwsnccnggnytnccnggncargtnggngaracnggnaarccnggngcnccnggnmgngayggngcnwsnggnaargayggngaymgnggnwsnccnggngtnccnggnwsnccnggnytnccnggnccngtnggnccnaarggngarccnggnccnacnggngcnccnggncargcngtngtnggnytnccnggngcnaarggngaraarggngcnccnggnggnytngcnggngayytngtnggngarccnggngcnaarggngaymgnggnytnccnggnccnmgnggngaraarggngargcnggnmgngcnggngarccnggngayccnggngargayggncaraarggngcnccnggnccnaarggnttyaarggngayccnggngtnggngtnccnggnwsnccnggnccnccnggnccnccnggngtnaarggngayytnggnytnccnggnytnccnggngcnccnggngtngtnggnttyccnggncaracnggnccnmgnggngaratgggncarccnggnccnwsnggngarmgnggnytngcnggnccnccnggnmgngarggnathccnggnccnytnggnccnccnggnccnccnggnwsngtnggnccnccnggngcnwsnggnytnaarggngayaarggngayccnggngtnggnytnccnggnccnmgnggngarmgnggngarccnggnathmgnggngargayggnmgnccnggncargarggnccnmgnggnytnacnggnccnccnggnwsnmgnggngarmgnggngaraarggngaygtnggnwsngcnggnytnaarggngayaarggngaywsngcngtnathytnggnccnccnggnccnmgnggngcnaarggngayatgggngarmgnggnccnmgnggnytngayggngayaarggnccnmgnggngayaayggngayccnggngayaarggnwsnaarggngarccnggngayaarggnwsngcnggnytnccnggnytnmgnggnytnytnggnccncarggncarccnggngcngcnggnathccnggngayccnggnwsnccnggnaargayggngtnccnggnathmgnggngaraarggngaygtnggnttyatgggnccnmgnggnytnaarggngarmgnggngtnaarggngcntgyggnytngayggngaraarggngayaarggngargcnggnccnccnggnmgnccnggnytngcnggncayaarggngaratgggngarccnggngtnccnggncarwsnggngcnccnggnaargarggnytnathggnccnaarggngaymgnggnttygayggncarccnggnccnaarggngaycarggngaraarggngarmgnggnacnccnggnathggnggnttyccnggnccnwsnggnaaygayggnwsngcnggnccnccnggnccnccnggnwsngtnggnccnmgnggnccngarggnytncarggncaraarggngarmgnggnccnccnggngarmgngtngtnggngcnccnggngtnccnggngcnccnggngarmgnggngarcarggnmgnccnggnccngcnggnccnmgnggngaraarggngargcn

SEQ ID NO: 1115 - DNA, 1362 bp, Artificial Sequence
  hCol-CNA20 (alpha1(VIII) THD)
  misc_feature (3)..(3): n is a, c, g, or t
  misc_feature (12)..(12): n is a, c, g, or t
  misc_feature (15)..(15): n is a, c, g, or t
  misc_feature (18)..(18): n is a, c, g, or t
  misc_feature (21)..(21): n is a, c, g, or t
  misc_feature (27)..(27): n is a, c, g, or t
  misc_feature (30)..(30): n is a, c, g, or t
  misc_feature (33)..(33): n is a, c, g, or t
  misc_feature (36)..(36): n is a, c, g, or t
  misc_feature (39)..(39): n is a, c, g, or t
  misc_feature (42)..(42): n is a, c, g, or t
  misc_feature (45)..(45): n is a, c, g, or t
  misc_feature (48)..(48): n is a, c, g, or t
  misc_feature (51)..(51): n is a, c, g, or t
  misc_feature (54)..(54): n is a, c, g, or t
  misc_feature (57)..(57): n is a, c, g, or t
  misc_feature (60)..(60): n is a, c, g, or t
  misc_feature (63)..(63): n is a, c, g, or t
  misc_feature (66)..(66): n is a, c, g, or t
  misc_feature (72)..(72): n is a, c, g, or t
  misc_feature (78)..(78): n is a, c, g, or t
  misc_feature (81)..(81): n is a, c, g, or t
  misc_feature (90)..(90): n is a, c, g, or t
  misc_feature (96)..(96): n is a, c, g, or t
  misc_feature (99)..(99): n is a, c, g, or t
  misc_feature (102)..(102): n is a, c, g, or t
  misc_feature (108)..(108): n is a, c, g, or t
  misc_feature (114)..(114): n is a, c, g, or t
  misc_feature (117)..(117): n is a, c, g, or t
  misc_feature (120)..(120): n is a, c, g, or t
  misc_feature (123)..(123): n is a, c, g, or t
  misc_feature (129)..(129): n is a, c, g, or t
  misc_feature (132)..(132): n is a, c, g, or t
  misc_feature (138)..(138): n is a, c, g, or t
  misc_feature (141)..(141): n is a, c, g, or t
  misc_feature (147)..(147): n is a, c, g, or t
  misc_feature (150)..(150): n is a, c, g, or t
  misc_feature (156)..(156): n is a, c, g, or t
  misc_feature (159)..(159): n is a, c, g, or t
  misc_feature (162)..(162): n is a, c, g, or t
  misc_feature (168)..(168): n is a, c, g, or t
  misc_feature (174)..(174): n is a, c, g, or t
  misc_feature (177)..(177): n is a, c, g, or t
  misc_feature (180)..(180): n is a, c, g, or t
  misc_feature (186)..(186): n is a, c, g, or t
  misc_feature (195)..(195): n is a, c, g, or t
  misc_feature (204)..(204): n is a, c, g, or t
  misc_feature (213)..(213): n is a, c, g, or t
  misc_feature (216)..(216): n is a, c, g, or t
  misc_feature (222)..(222): n is a, c, g, or t
  misc_feature (228)..(228): n is a, c, g, or t
  misc_feature (231)..(231): n is a, c, g, or t
  misc_feature (234)..(234): n is a, c, g, or t
  misc_feature (240)..(240): n is a, c, g, or t
  misc_feature (243)..(243): n is a, c, g, or t
  misc_feature (246)..(246): n is a, c, g, or t
  misc_feature (249)..(249): n is a, c, g, or t
  misc_feature (252)..(252): n is a, c, g, or t
  misc_feature (258)..(258): n is a, c, g, or t
  misc_feature (261)..(261): n is a, c, g, or t
  misc_feature (264)..(264): n is a, c, g, or t
  misc_feature (267)..(267): n is a, c, g, or t
  misc_feature (273)..(273): n is a, c, g, or t
  misc_feature (279)..(279): n is a, c, g, or t
  misc_feature (282)..(282): n is a, c, g, or t
  misc_feature (285)..(285): n is a, c, g, or t
  misc_feature (288)..(288): n is a, c, g, or t
  misc_feature (291)..(291): n is a, c, g, or t
  misc_feature (294)..(294): n is a, c, g, or t
  misc_feature (297)..(297): n is a, c, g, or t
  misc_feature (300)..(300): n is a, c, g, or t
  misc_feature (306)..(306): n is a, c, g, or t
  misc_feature (309)..(309): n is a, c, g, or t
  misc_feature (312)..(312): n is a, c, g, or t
  misc_feature (318)..(318): n is a, c, g, or t
  misc_feature (324)..(324): n is a, c, g, or t
  misc_feature (327)..(327): n is a, c, g, or t
  misc_feature (330)..(330): n is a, c, g, or t
  misc_feature (336)..(336): n is a, c, g, or t
  misc_feature (339)..(339): n is a, c, g, or t
  misc_feature (342)..(342): n is a, c, g, or t
  misc_feature (345)..(345): n is a, c, g, or t
  misc_feature (348)..(348): n is a, c, g, or t
  misc_feature (354)..(354): n is a, c, g, or t
  misc_feature (357)..(357): n is a, c, g, or t
  misc_feature (360)..(360): n is a, c, g, or t
  misc_feature (363)..(363): n is a, c, g, or t
  misc_feature (366)..(366): n is a, c, g, or t
  misc_feature (372)..(372): n is a, c, g, or t
  misc_feature (381)..(381): n is a, c, g, or t
  misc_feature (387)..(387): n is a, c, g, or t
  misc_feature (393)..(393): n is a, c, g, or t
  misc_feature (396)..(396): n is a, c, g, or t
  misc_feature (399)..(399): n is a, c, g, or t
  misc_feature (402)..(402): n is a, c, g, or t
  misc_feature (405)..(405): n is a, c, g, or t
  misc_feature (408)..(408): n is a, c, g, or t
  misc_feature (414)..(414): n is a, c, g, or t
  misc_feature (417)..(417): n is a, c, g, or t
  misc_feature (420)..(420): n is a, c, g, or t
  misc_feature (423)..(423): n is a, c, g, or t
  misc_feature (432)..(432): n is a, c, g, or t
  misc_feature (435)..(435): n is a, c, g, or t
  misc_feature (438)..(438): n is a, c, g, or t
  misc_feature (441)..(441): n is a, c, g, or t
  misc_feature (444)..(444): n is a, c, g, or t
  misc_feature (447)..(447): n is a, c, g, or t
  misc_feature (450)..(450): n is a, c, g, or t
  misc_feature (453)..(453): n is a, c, g, or t
  misc_feature (456)..(456): n is a, c, g, or t
  misc_feature (459)..(459): n is a, c, g, or t
  misc_feature (462)..(462): n is a, c, g, or t
  misc_feature (465)..(465): n is a, c, g, or t
  misc_feature (471)..(471): n is a, c, g, or t
  misc_feature (474)..(474): n is a, c, g, or t
  misc_feature (477)..(477): n is a, c, g, or t
  misc_feature (480)..(480): n is a, c, g, or t
  misc_feature (483)..(483): n is a, c, g, or t
  misc_feature (489)..(489): n is a, c, g, or t
  misc_feature (492)..(492): n is a, c, g, or t
  misc_feature (495)..(495): n is a, c, g, or t
  misc_feature (501)..(501): n is a, c, g, or t
  misc_feature (504)..(504): n is a, c, g, or t
  misc_feature (507)..(507): n is a, c, g, or t
  misc_feature (510)..(510): n is a, c, g, or t
  misc_feature (516)..(516): n is a, c, g, or t
  misc_feature (519)..(519): n is a, c, g, or t
  misc_feature (522)..(522): n is a, c, g, or t
  misc_feature (525)..(525): n is a, c, g, or t
  misc_feature (528)..(528): n is a, c, g, or t
  misc_feature (534)..(534): n is a, c, g, or t
  misc_feature (537)..(537): n is a, c, g, or t
  misc_feature (540)..(540): n is a, c, g, or t
  misc_feature (546)..(546): n is a, c, g, or t
  misc_feature (549)..(549): n is a, c, g, or t
  misc_feature (555)..(555): n is a, c, g, or t
  misc_feature (558)..(558): n is a, c, g, or t
  misc_feature (561)..(561): n is a, c, g, or t
  misc_feature (564)..(564): n is a, c, g, or t
  misc_feature (567)..(567): n is a, c, g, or t
  misc_feature (573)..(573): n is a, c, g, or t
  misc_feature (576)..(576): n is a, c, g, or t
  misc_feature (579)..(579): n is a, c, g, or t
  misc_feature (582)..(582): n is a, c, g, or t
  misc_feature (588)..(588): n is a, c, g, or t
  misc_feature (591)..(591): n is a, c, g, or t
  misc_feature (597)..(597): n is a, c, g, or t
  misc_feature (603)..(603): n is a, c, g, or t
  misc_feature (606)..(606): n is a, c, g, or t
  misc_feature (615)..(615): n is a, c, g, or t
  misc_feature (621)..(621): n is a, c, g, or t
  misc_feature (624)..(624): n is a, c, g, or t
  misc_feature (630)..(630): n is a, c, g, or t
  misc_feature (633)..(633): n is a, c, g, or t
  misc_feature (639)..(639): n is a, c, g, or t
  misc_feature (642)..(642): n is a, c, g, or t
  misc_feature (645)..(645): n is a, c, g, or t
  misc_feature (651)..(651): n is a, c, g, or t
  misc_feature (660)..(660): n is a, c, g, or t
  misc_feature (663)..(663): n is a, c, g, or t
  misc_feature (666)..(666): n is a, c, g, or t
  misc_feature (669)..(669): n is a, c, g, or t
  misc_feature (672)..(672): n is a, c, g, or t
  misc_feature (675)..(675): n is a, c, g, or t
  misc_feature (678)..(678): n is a, c, g, or t
  misc_feature (681)..(681): n is a, c, g, or t
  misc_feature (684)..(684): n is a, c, g, or t
  misc_feature (687)..(687): n is a, c, g, or t
  misc_feature (690)..(690): n is a, c, g, or t
  misc_feature (693)..(693): n is a, c, g, or t
  misc_feature (696)..(696): n is a, c, g, or t
  misc_feature (702)..(702): n is a, c, g, or t
  misc_feature (708)..(708): n is a, c, g, or t
  misc_feature (711)..(711): n is a, c, g, or t
  misc_feature (717)..(717): n is a, c, g, or t
  misc_feature (720)..(720): n is a, c, g, or t
  misc_feature (723)..(723): n is a, c, g, or t
  misc_feature (729)..(729): n is a, c, g, or t
  misc_feature (735)..(735): n is a, c, g, or t
  misc_feature (738)..(738): n is a, c, g, or t
  misc_feature (744)..(744): n is a, c, g, or t
  misc_feature (747)..(747): n is a, c, g, or t
  misc_feature (750)..(750): n is a, c, g, or t
  misc_feature (753)..(753): n is a, c, g, or t
  misc_feature (756)..(756): n is a, c, g, or t
  misc_feature (759)..(759): n is a, c, g, or t
  misc_feature (762)..(762): n is a, c, g, or t
  misc_feature (765)..(765): n is a, c, g, or t
  misc_feature (768)..(768): n is a, c, g, or t
  misc_feature (771)..(771): n is a, c, g, or t
  misc_feature (774)..(774): n is a, c, g, or t
  misc_feature (783)..(783): n is a, c, g, or t
  misc_feature (786)..(786): n is a, c, g, or t
  misc_feature (792)..(792): n is a, c, g, or t
  misc_feature (795)..(795): n is a, c, g, or t
  misc_feature (798)..(798): n is a, c, g, or t
  misc_feature (801)..(801): n is a, c, g, or t
  misc_feature (807)..(807): n is a, c, g, or t
  misc_feature (810)..(810): n is a, c, g, or t
  misc_feature (813)..(813): n is a, c, g, or t
  misc_feature (816)..(816): n is a, c, g, or t
  misc_feature (819)..(819): n is a, c, g, or t
  misc_feature (825)..(825): n is a, c, g, or t
  misc_feature (828)..(828): n is a, c, g, or t
  misc_feature (831)..(831): n is a, c, g, or t
  misc_feature (834)..(834): n is a, c, g, or t
  misc_feature (837)..(837): n is a, c, g, or t
  misc_feature (843)..(843): n is a, c, g, or t
  misc_feature (846)..(846): n is a, c, g, or t
  misc_feature (849)..(849): n is a, c, g, or t
  misc_feature (855)..(855): n is a, c, g, or t
  misc_feature (858)..(858): n is a, c, g, or t
  misc_feature (861)..(861): n is a, c, g, or t
  misc_feature (864)..(864): n is a, c, g, or t
  misc_feature (867)..(867): n is a, c, g, or t
  misc_feature (873)..(873): n is a, c, g, or t
  misc_feature (879)..(879): n is a, c, g, or t
  misc_feature (882)..(882): n is a, c, g, or t
  misc_feature (885)..(885): n is a, c, g, or t
  misc_feature (891)..(891): n is a, c, g, or t
  misc_feature (897)..(897): n is a, c, g, or t
  misc_feature (900)..(900): n is a, c, g, or t
  misc_feature (906)..(906): n is a, c, g, or t
  misc_feature (909)..(909): n is a, c, g, or t
  misc_feature (912)..(912): n is a, c, g, or t
  misc_feature (918)..(918): n is a, c, g, or t
  misc_feature (921)..(921): n is a, c, g, or t
  misc_feature (924)..(924): n is a, c, g, or t
  misc_feature (927)..(927): n is a, c, g, or t
  misc_feature (930)..(930): n is a, c, g, or t
  misc_feature (936)..(936): n is a, c, g, or t
  misc_feature (942)..(942): n is a, c, g, or t
  misc_feature (945)..(945): n is a, c, g, or t
  misc_feature (948)..(948): n is a, c, g, or t
  misc_feature (954)..(954): n is a, c, g, or t
  misc_feature (960)..(960): n is a, c, g, or t
  misc_feature (963)..(963): n is a, c, g, or t
  misc_feature (969)..(969): n is a, c, g, or t
  misc_feature (972)..(972): n is a, c, g, or t
  misc_feature (978)..(978): n is a, c, g, or t
  misc_feature (981)..(981): n is a, c, g, or t
  misc_feature (987)..(987): n is a, c, g, or t
  misc_feature (990)..(990): n is a, c, g, or t
  misc_feature (993)..(993): n is a, c, g, or t
  misc_feature (996)..(996): n is a, c, g, or t
  misc_feature (999)..(999): n is a, c, g, or t
  misc_feature (1005)..(1005): n is a, c, g, or t
  misc_feature (1008)..(1008): n is a, c, g, or t
  misc_feature (1011)..(1011): n is a, c, g, or t
  misc_feature (1014)..(1014): n is a, c, g, or t
  misc_feature (1017)..(1017): n is a, c, g, or t
  misc_feature (1020)..(1020): n is a, c, g, or t
  misc_feature (1026)..(1026): n is a, c, g, or t
  misc_feature (1029)..(1029): n is a, c, g, or t
  misc_feature (1035)..(1035): n is a, c, g, or t
  misc_feature (1041)..(1041): n is a, c, g, or t
  misc_feature (1044)..(1044): n is a, c, g, or t
  misc_feature (1053)..(1053): n is a, c, g, or t
  misc_feature (1056)..(1056): n is a, c, g, or t
  misc_feature (1059)..(1059): n is a, c, g, or t
  misc_feature (1062)..(1062): n is a, c, g, or t
  misc_feature (1065)..(1065): n is a, c, g, or t
  misc_feature (1068)..(1068): n is a, c, g, or t
  misc_feature (1071)..(1071): n is a, c, g, or t
  misc_feature (1074)..(1074): n is a, c, g, or t
  misc_feature (1077)..(1077): n is a, c, g, or t
  misc_feature (1080)..(1080): n is a, c, g, or t
  misc_feature (1083)..(1083): n is a, c, g, or t
  misc_feature (1086)..(1086): n is a, c, g, or t
  misc_feature (1089)..(1089): n is a, c, g, or t
  misc_feature (1092)..(1092): n is a, c, g, or t
  misc_feature (1098)..(1098): n is a, c, g, or t
  misc_feature (1104)..(1104): n is a, c, g, or t
  misc_feature (1107)..(1107): n is a, c, g, or t
  misc_feature (1113)..(1113): n is a, c, g, or t
  misc_feature (1116)..(1116): n is a, c, g, or t
  misc_feature (1125)..(1125): n is a, c, g, or t
  misc_feature (1128)..(1128): n is a, c, g, or t
  misc_feature (1134)..(1134): n is a, c, g, or t
  misc_feature (1137)..(1137): n is a, c, g, or t
  misc_feature (1140)..(1140): n is a, c, g, or t
  misc_feature (1143)..(1143): n is a, c, g, or t
  misc_feature (1149)..(1149): n is a, c, g, or t
  misc_feature (1152)..(1152): n is a, c, g, or t
  misc_feature (1158)..(1158): n is a, c, g, or t
  misc_feature (1161)..(1161): n is a, c, g, or t
  misc_feature (1164)..(1164): n is a, c, g, or t
  misc_feature (1167)..(1167): n is a, c, g, or t
  misc_feature (1170)..(1170): n is a, c, g, or t
  misc_feature (1173)..(1173): n is a, c, g, or t
  misc_feature (1179)..(1179): n is a, c, g, or t
  misc_feature (1182)..(1182): n is a, c, g, or t
  misc_feature (1185)..(1185): n is a, c, g, or t
  misc_feature (1188)..(1188): n is a, c, g, or t
  misc_feature (1194)..(1194): n is a, c, g, or t
  misc_feature (1197)..(1197): n is a, c, g, or t
  misc_feature (1200)..(1200): n is a, c, g, or t
  misc_feature (1206)..(1206): n is a, c, g, or t
  misc_feature (1212)..(1212): n is a, c, g, or t
  misc_feature (1215)..(1215): n is a, c, g, or t
  misc_feature (1218)..(1218): n is a, c, g, or t
  misc_feature (1221)..(1221): n is a, c, g, or t
  misc_feature (1224)..(1224): n is a, c, g, or t
  misc_feature (1227)..(1227): n is a, c, g, or t
  misc_feature (1230)..(1230): n is a, c, g, or t
  misc_feature (1233)..(1233): n is a, c, g, or t
  misc_feature (1239)..(1239): n is a, c, g, or t
  misc_feature (1242)..(1242): n is a, c, g, or t
  misc_feature (1248)..(1248): n is a, c, g, or t
  misc_feature (1254)..(1254): n is a, c, g, or t
  misc_feature (1257)..(1257): n is a, c, g, or t
  misc_feature (1260)..(1260): n is a, c, g, or t
  misc_feature (1263)..(1263): n is a, c, g, or t
  misc_feature (1266)..(1266): n is a, c, g, or t
  misc_feature (1269)..(1269): n is a, c, g, or t
  misc_feature (1275)..(1275): n is a, c, g, or t
  misc_feature (1278)..(1278): n is a, c, g, or t
  misc_feature (1281)..(1281): n is a, c, g, or t
  misc_feature (1284)..(1284): n is a, c, g, or t
  misc_feature (1290)..(1290): n is a, c, g, or t
  misc_feature (1293)..(1293): n is a, c, g, or t
  misc_feature (1296)..(1296): n is a, c, g, or t
  misc_feature (1299)..(1299): n is a, c, g, or t
  misc_feature (1302)..(1302): n is a, c, g, or t
  misc_feature (1305)..(1305): n is a, c, g, or t
  misc_feature (1311)..(1311): n is a, c, g, or t
  misc_feature (1317)..(1317): n is a, c, g, or t
  misc_feature (1320)..(1320): n is a, c, g, or t
  misc_feature (1323)..(1323): n is a, c, g, or t
  misc_feature (1326)..(1326): n is a, c, g, or t
  misc_feature (1329)..(1329): n is a, c, g, or t
  misc_feature (1332)..(1332): n is a, c, g, or t
  misc_feature (1335)..(1335): n is a, c, g, or t
  misc_feature (1338)..(1338): n is a, c, g, or t
  misc_feature (1341)..(1341): n is a, c, g, or t
  misc_feature (1344)..(1344): n is a, c, g, or t
  misc_feature (1347)..(1347): n is a, c, g, or t
  misc_feature (1350)..(1350): n is a, c, g, or t
  misc_feature (1353)..(1353): n is a, c, g, or t
  misc_feature (1356)..(1356): n is a, c, g, or t
  misc_feature (1359)..(1359): n is a, c, g, or t
  misc_feature (1362)..(1362): n is a, c, g, or t
ggngarcarggnccnmgnggngarccnggnccnmgnggnccnccnggnccnccnggnytnccnggncayggnathccnggnathaarggnaarccnggnccncarggntayccnggngtnggnaarccnggnatgccnggnatgccnggnaarccnggngcnatgggnatgccnggngcnaarggngarathggncaraarggngarathggnccnatgggnathccnggnccncarggnccnccnggnccncayggnytnccnggnathggnaarccnggnggnccnggnytnccnggncarccnggnccnaarggngaymgnggnccnaarggnytnccnggnccncarggnytnmgnggnccnaarggngayaarggnttyggnatgccnggngcnccnggngtnaarggnccnccnggnatgcayggnccnccnggnccngtnggnytnccnggngtnggnaarccnggngtnacnggnttyccnggnccncarggnccnytnggnaarccnggngcnccnggngarccnggnccncarggnccnathggngtnccnggngtncarggnccnccnggnathccnggnathggnaarccnggncargayggnathccnggncarccnggnttyccnggnggnaarggngarcarggnytnccnggnytnccnggnccnccnggnytnccnggnathggnaarccnggnttyccnggnccnaarggngaymgnggnatgggnggngtnccnggngcnytnggnccnmgnggngaraarggnccnathggngcnccnggnathggnggnccnccnggngarccnggnytnccnggnathccnggnccnatgggnccnccnggngcnathggnttyccnggnccnaarggngarggnggnathgtnggnccncarggnccnccnggnccnaarggngarccnggnytncarggnttyccnggnaarccnggnttyytnggngargtnggnccnccnggnatgmgnggnytnccnggnccnathggnccnaarggngargcnggncaraarggngtnccnggnytnccnggngtnccnggnytnytnggnccnaarggngarccnggnathccnggngaycarggnytncarggnccnccnggnathccnggnathggnggnccnwsnggnccnathggnccnccnggnathccnggnccnaarggngarccnggnytnccnggnccnccnggnttyccnggnathggnaarccnggngtngcnggnytncayggnccnccnggnaarccnggngcnytnggnccncarggncarccnggnytnccnggnccnccnggnccnccnggnccnccnggnccnccn

SEQ ID NO: 1116 - DNA, 1380 bp, Artificial Sequence
  hCol-CNA21 (alpha2(VIII) THD)
  misc_feature (3)..(3): n is a, c, g, or t
  misc_feature (9)..(9): n is a, c, g, or t
  misc_feature (12)..(12): n is a, c, g, or t
  misc_feature (15)..(15): n is a, c, g, or t
  misc_feature (18)..(18): n is a, c, g, or t
  misc_feature (21)..(21): n is a, c, g, or t
  misc_feature (27)..(27): n is a, c, g, or t
  misc_feature (30)..(30): n is a, c, g, or t
  misc_feature (33)..(33): n is a, c, g, or t
  misc_feature (36)..(36): n is a, c, g, or t
  misc_feature (39)..(39): n is a, c, g, or t
  misc_feature (42)..(42): n is a, c, g, or t
  misc_feature (45)..(45): n is a, c, g, or t
  misc_feature (48)..(48): n is a, c, g, or t
  misc_feature (51)..(51): n is a, c, g, or t
  misc_feature (54)..(54): n is a, c, g, or t
  misc_feature (57)..(57): n is a, c, g, or t
  misc_feature (63)..(63): n is a, c, g, or t
  misc_feature (66)..(66): n is a, c, g, or t
  misc_feature (72)..(72): n is a, c, g, or t
  misc_feature (75)..(75): n is a, c, g, or t
  misc_feature (81)..(81): n is a, c, g, or t
  misc_feature (87)..(87): n is a, c, g, or t
  misc_feature (90)..(90): n is a, c, g, or t
  misc_feature (93)..(93): n is a, c, g, or t
  misc_feature (99)..(99): n is a, c, g, or t
  misc_feature (105)..(105): n is a, c, g, or t
  misc_feature (108)..(108): n is a, c, g, or t
  misc_feature (111)..(111): n is a, c, g, or t
  misc_feature (114)..(114): n is a, c, g, or t
  misc_feature (117)..(117): n is a, c, g, or t
  misc_feature (120)..(120): n is a, c, g, or t
  misc_feature (123)..(123): n is a, c, g, or t
  misc_feature (126)..(126): n is a, c, g, or t
  misc_feature (132)..(132): n is a, c, g, or t
  misc_feature (135)..(135): n is a, c, g, or t
  misc_feature (141)..(141): n is a, c, g, or t
  misc_feature (147)..(147): n is a, c, g, or t
  misc_feature (150)..(150): n is a, c, g, or t
  misc_feature (153)..(153): n is a, c, g, or t
  misc_feature (156)..(156): n is a, c, g, or t
  misc_feature (159)..(159): n is a, c, g, or t
  misc_feature (162)..(162): n is a, c, g, or t
  misc_feature (165)..(165): n is a, c, g, or t
  misc_feature (168)..(168): n is a, c, g, or t
  misc_feature (174)..(174): n is a, c, g, or t
  misc_feature (177)..(177): n is a, c, g, or t
  misc_feature (180)..(180): n is a, c, g, or t
  misc_feature (183)..(183): n is a, c, g, or t
  misc_feature (186)..(186): n is a, c, g, or t
  misc_feature (192)..(192): n is a, c, g, or t
  misc_feature (195)..(195): n is a, c, g, or t
  misc_feature (198)..(198): n is a, c, g, or t
  misc_feature (201)..(201): n is a, c, g, or t
  misc_feature (204)..(204): n is a, c, g, or t
  misc_feature (210)..(210): n is a, c, g, or t
  misc_feature (213)..(213): n is a, c, g, or t
  misc_feature (219)..(219): n is a, c, g, or t
  misc_feature (222)..(222): n is a, c, g, or t
  misc_feature (231)..(231): n is a, c, g, or t
  misc_feature (234)..(234): n is a, c, g, or t
  misc_feature (237)..(237): n is a, c, g, or t
  misc_feature (240)..(240): n is a, c, g, or t
  misc_feature (243)..(243): n is a, c, g, or t
  misc_feature (246)..(246): n is a, c, g, or t
  misc_feature (249)..(249): n is a, c, g, or t
  misc_feature (252)..(252): n is a, c, g, or t
  misc_feature (255)..(255): n is a, c, g, or t
  misc_feature (258)..(258): n is a, c, g, or t
  misc_feature (261)..(261): n is a, c, g, or t
  misc_feature (264)..(264): n is a, c, g, or t
  misc_feature (267)..(267): n is a, c, g, or t
  misc_feature (270)..(270): n is a, c, g, or t
  misc_feature (273)..(273): n is a, c, g, or t
  misc_feature (276)..(276): n is a, c, g, or t
  misc_feature (282)..(282): n is a, c, g, or t
  misc_feature (288)..(288): n is a, c, g, or t
  misc_feature (291)..(291): n is a, c, g, or t
  misc_feature (297)..(297): n is a, c, g, or t
  misc_feature (300)..(300): n is a, c, g, or t
  misc_feature (303)..(303): n is a, c, g, or t
  misc_feature (309)..(309): n is a, c, g, or t
  misc_feature (312)..(312): n is a, c, g, or t
  misc_feature (315)..(315): n is a, c, g, or t
  misc_feature (318)..(318): n is a, c, g, or t
  misc_feature (321)..(321): n is a, c, g, or t
  misc_feature (324)..(324): n is a, c, g, or t
  misc_feature (327)..(327): n is a, c, g, or t
  misc_feature (336)..(336): n is a, c, g, or t
  misc_feature (342)..(342): n is a, c, g, or t
  misc_feature (345)..(345): n is a, c, g, or t
  misc_feature (348)..(348): n is a, c, g, or t
  misc_feature (354)..(354): n is a, c, g, or t
  misc_feature (360)..(360): n is a, c, g, or t
  misc_feature (363)..(363): n is a, c, g, or t
  misc_feature (366)..(366): n is a, c, g, or t
  misc_feature (369)..(369): n is a, c, g, or t
  misc_feature (372)..(372): n is a, c, g, or t
  misc_feature (378)..(378): n is a, c, g, or t
  misc_feature (381)..(381): n is a, c, g, or t
  misc_feature (384)..(384): n is a, c, g, or t
  misc_feature (390)..(390): n is a, c, g, or t
  misc_feature (399)..(399): n is a, c, g, or t
  misc_feature (402)..(402): n is a, c, g, or t
  misc_feature (405)..(405): n is a, c, g, or t
  misc_feature (411)..(411): n is a, c, g, or t
  misc_feature (414)..(414): n is a, c, g, or t
  misc_feature (417)..(417): n is a, c, g, or t
  misc_feature (420)..(420): n is a, c, g, or t
  misc_feature (423)..(423): n is a, c, g, or t
  misc_feature (426)..(426): n is a, c, g, or t
  misc_feature (429)..(429): n is a, c, g, or t
  misc_feature (432)..(432): n is a, c, g, or t
  misc_feature (438)..(438): n is a, c, g, or t
  misc_feature (441)..(441): n is a, c, g, or t
  misc_feature (444)..(444): n is a, c, g, or t
  misc_feature (447)..(447): n is a, c, g, or t
  misc_feature (450)..(450): n is a, c, g, or t
  misc_feature (453)..(453): n is a, c, g, or t
  misc_feature (456)..(456): n is a, c, g, or t
  misc_feature (459)..(459): n is a, c, g, or t
  misc_feature (462)..(462): n is a, c, g, or t
  misc_feature (465)..(465): n is a, c, g, or t
  misc_feature (468)..(468): n is a, c, g, or t
  misc_feature (471)..(471): n is a, c, g, or t
  misc_feature (474)..(474): n is a, c, g, or t
  misc_feature (477)..(477): n is a, c, g, or t
  misc_feature (480)..(480): n is a, c, g, or t
  misc_feature (483)..(483): n is a, c, g, or t
  misc_feature (489)..(489): n is a, c, g, or t
  misc_feature (492)..(492): n is a, c, g, or t
  misc_feature (495)..(495): n is a, c, g, or t
  misc_feature (501)..(501): n is a, c, g, or t
  misc_feature (504)..(504): n is a, c, g, or t
  misc_feature (507)..(507): n is a, c, g, or t
  misc_feature (510)..(510): n is a, c, g, or t
  misc_feature (513)..(513): n is a, c, g, or t
  misc_feature (516)..(516): n is a, c, g, or t
  misc_feature (519)..(519): n is a, c, g, or t
  misc_feature (528)..(528): n is a, c, g, or t
  misc_feature (534)..(534): n is a, c, g, or t
  misc_feature (537)..(537): n is a, c, g, or t
  misc_feature (540)..(540): n is a, c, g, or t
  misc_feature (543)..(543): n is a, c, g, or t
  misc_feature (546)..(546): n is a, c, g, or t
  misc_feature (549)..(549): n is a, c, g, or t
  misc_feature (552)..(552): n is a, c, g, or t
  misc_feature (555)..(555): n is a, c, g, or t
  misc_feature (558)..(558): n is a, c, g, or t
  misc_feature (561)..(561): n is a, c, g, or t
  misc_feature (564)..(564): n is a, c, g, or t
  misc_feature (570)..(570): n is a, c, g, or t
  misc_feature (573)..(573): n is a, c, g, or t
  misc_feature (576)..(576): n is a, c, g, or t
  misc_feature (579)..(579): n is a, c, g, or t
  misc_feature (582)..(582): n is a, c, g, or t
  misc_feature (585)..(585): n is a, c, g, or t
  misc_feature (591)..(591): n is a, c, g, or t
  misc_feature (594)..(594): n is a, c, g, or t
  misc_feature (597)..(597): n is a, c, g, or t
  misc_feature (600)..(600): n is a, c, g, or t
  misc_feature (603)..(603): n is a, c, g, or t
  misc_feature (609)..(609): n is a, c, g, or t
  misc_feature (612)..(612): n is a, c, g, or t
  misc_feature (615)..(615): n is a, c, g, or t
  misc_feature (618)..(618): n is a, c, g, or t
  misc_feature (621)..(621): n is a, c, g, or t
  misc_feature (624)..(624): n is a, c, g, or t
  misc_feature (627)..(627): n is a, c, g, or t
  misc_feature (630)..(630): n is a, c, g, or t
  misc_feature (633)..(633): n is a, c, g, or t
  misc_feature (636)..(636): n is a, c, g, or t
  misc_feature (639)..(639): n is a, c, g, or t
  misc_feature (642)..(642): n is a, c, g, or t
  misc_feature (645)..(645): n is a, c, g, or t
  misc_feature (651)..(651): n is a, c, g, or t
  misc_feature (654)..(654): n is a, c, g, or t
  misc_feature (657)..(657): n is a, c, g, or t
  misc_feature (660)..(660): n is a, c, g, or t
  misc_feature (663)..(663): n is a, c, g, or t
  misc_feature (669)..(669): n is a, c, g, or t
  misc_feature (675)..(675): n is a, c, g, or t
  misc_feature (678)..(678): n is a, c, g, or t
  misc_feature (681)..(681): n is a, c, g, or t
  misc_feature (684)..(684): n is a, c, g, or t
  misc_feature (687)..(687): n is a, c, g, or t
  misc_feature (690)..(690): n is a, c, g, or t
  misc_feature (693)..(693): n is a, c, g, or t
  misc_feature (696)..(696): n is a, c, g, or t
  misc_feature (699)..(699): n is a, c, g, or t
  misc_feature (705)..(705): n is a, c, g, or t
  misc_feature (708)..(708): n is a, c, g, or t
  misc_feature (711)..(711): n is a, c, g, or t
  misc_feature (714)..(714): n is a, c, g, or t
  misc_feature (720)..(720): n is a, c, g, or t
  misc_feature (726)..(726): n is a, c, g, or t
  misc_feature (729)..(729): n is a, c, g, or t
  misc_feature (732)..(732): n is a, c, g, or t
  misc_feature (735)..(735): n is a, c, g, or t
  misc_feature (738)..(738): n is a, c, g, or t
  misc_feature (741)..(741): n is a, c, g, or t
  misc_feature (747)..(747): n is a, c, g, or t
  misc_feature (753)..(753): n is a, c, g, or t
  misc_feature (756)..(756): n is a, c, g, or t
  misc_feature (759)..(759): n is a, c, g, or t
  misc_feature (762)..(762): n is a, c, g, or t
  misc_feature (765)..(765): n is a, c, g, or t
  misc_feature (768)..(768): n is a, c, g, or t
  misc_feature (771)..(771): n is a, c, g, or t
  misc_feature (774)..(774): n is a, c, g, or t
  misc_feature (777)..(777): n is a, c, g, or t
  misc_feature (780)..(780): n is a, c, g, or t
  misc_feature (783)..(783): n is a, c, g, or t
  misc_feature (789)..(789): n is a, c, g, or t
  misc_feature (792)..(792): n is a, c, g, or t
  misc_feature (798)..(798): n is a, c, g, or t
  misc_feature (801)..(801): n is a, c, g, or t
  misc_feature (810)..(810): n is a, c, g, or t
  misc_feature (816)..(816): n is a, c, g, or t
  misc_feature (819)..(819): n is a, c, g, or t
  misc_feature (828)..(828): n is a, c, g, or t
  misc_feature (831)..(831): n is a, c, g, or t
  misc_feature (837)..(837): n is a, c, g, or t
  misc_feature (840)..(840): n is a, c, g, or t
  misc_feature (843)..(843): n is a, c, g, or t
  misc_feature (846)..(846): n is a, c, g, or t
  misc_feature (849)..(849): n is a, c, g, or t
  misc_feature (852)..(852): n is a, c, g, or t
  misc_feature (855)..(855): n is a, c, g, or t
  misc_feature (858)..(858): n is a, c, g, or t
  misc_feature (861)..(861): n is a, c, g, or t
  misc_feature (864)..(864): n is a, c, g, or t
  misc_feature (867)..(867): n is a, c, g, or t
  misc_feature (870)..(870): n is a, c, g, or t
  misc_feature (873)..(873): n is a, c, g, or t
  misc_feature (876)..(876): n is a, c, g, or t
  misc_feature (879)..(879): n is a, c, g, or t
  misc_feature (882)..(882): n is a, c, g, or t
  misc_feature (885)..(885): n is a, c, g, or t
  misc_feature (888)..(888): n is a, c, g, or t
  misc_feature (891)..(891): n is a, c, g, or t
  misc_feature (894)..(894): n is a, c, g, or t
  misc_feature (897)..(897): n is a, c, g, or t
  misc_feature (900)..(900): n is a, c, g, or t
  misc_feature (903)..(903): n is a, c, g, or t
  misc_feature (909)..(909): n is a, c, g, or t
  misc_feature (915)..(915): n is a, c, g, or t
  misc_feature (918)..(918): n is a, c, g, or t
  misc_feature (921)..(921): n is a, c, g, or t
  misc_feature (924)..(924): n is a, c, g, or t
  misc_feature (927)..(927): n is a, c, g, or t
  misc_feature (930)..(930): n is a, c, g, or t
  misc_feature (933)..(933): n is a, c, g, or t
  misc_feature (936)..(936): n is a, c, g, or t
  misc_feature (939)..(939): n is a, c, g, or t
  misc_feature (942)..(942): n is a, c, g, or t
  misc_feature (945)..(945): n is a, c, g, or t
  misc_feature (951)..(951): n is a, c, g, or t
  misc_feature (954)..(954): n is a, c, g, or t
  misc_feature (963)..(963): n is a, c, g, or t
  misc_feature (966)..(966): n is a, c, g, or t
  misc_feature (969)..(969): n is a, c, g, or t
  misc_feature (972)..(972): n is a, c, g, or t
  misc_feature (975)..(975): n is a, c, g, or t
  misc_feature (978)..(978): n is a, c, g, or t
  misc_feature (981)..(981): n is a, c, g, or t
  misc_feature (987)..(987): n is a, c, g, or t
  misc_feature (990)..(990): n is a, c, g, or t
  misc_feature (993)..(993): n is a, c, g, or t
  misc_feature (996)..(996): n is a, c, g, or t
  misc_feature (999)..(999): n is a, c, g, or t
  misc_feature (1005)..(1005): n is a, c, g, or t
  misc_feature (1008)..(1008): n is a, c, g, or t
  misc_feature (1011)..(1011): n is a, c, g, or t
  misc_feature (1014)..(1014): n is a, c, g, or t
  misc_feature (1017)..(1017): n is a, c, g, or t
  misc_feature (1020)..(1020): n is a, c, g, or t
  misc_feature (1026)..(1026): n is a, c, g, or t
  misc_feature (1029)..(1029): n is a, c, g, or t
  misc_feature (1032)..(1032): n is a, c, g, or t
  misc_feature (1035)..(1035): n is a, c, g, or t
  misc_feature (1038)..(1038): n is a, c, g, or t
  misc_feature (1041)..(1041): n is a, c, g, or t
  misc_feature (1044)..(1044): n is a, c, g, or t
  misc_feature (1047)..(1047): n is a, c, g, or t
  misc_feature (1053)..(1053): n is a, c, g, or t
  misc_feature (1059)..(1059): n is a, c, g, or t
  misc_feature (1062)..(1062): n is a, c, g, or t
  misc_feature (1068)..(1068): n is a, c, g, or t
  misc_feature (1071)..(1071): n is a, c, g, or t
  misc_feature (1074)..(1074): n is a, c, g, or t
  misc_feature (1077)..(1077): n is a, c, g, or t
  misc_feature (1080)..(1080): n is a, c, g, or t
  misc_feature (1083)..(1083): n is a, c, g, or t
  misc_feature (1086)..(1086): n is a, c, g, or t
  misc_feature (1089)..(1089): n is a, c, g, or t
  misc_feature (1092)..(1092): n is a, c, g, or t
  misc_feature (1095)..(1095): n is a, c, g, or t
  misc_feature (1098)..(1098): n is a, c, g, or t
  misc_feature (1101)..(1101): n is a, c, g, or t
  misc_feature (1104)..(1104): n is a, c, g, or t
  misc_feature (1107)..(1107): n is a, c, g, or t
  misc_feature (1116)..(1116): n is a, c, g, or t
  misc_feature (1122)..(1122): n is a, c, g, or t
  misc_feature (1125)..(1125): n is a, c, g, or t
  misc_feature (1128)..(1128): n is a, c, g, or t
  misc_feature (1131)..(1131): n is a, c, g, or t
  misc_feature (1134)..(1134): n is a, c, g, or t
  misc_feature (1140)..(1140): n is a, c, g, or t
  misc_feature (1143)..(1143): n is a, c, g, or t
  misc_feature (1146)..(1146): n is a, c, g, or t
  misc_feature (1149)..(1149): n is a, c, g, or t
  misc_feature (1152)..(1152): n is a, c, g, or t
  misc_feature (1155)..(1155): n is a, c, g, or t
  misc_feature (1158)..(1158): n is a, c, g, or t
  misc_feature (1161)..(1161): n is a, c, g, or t
  misc_feature (1167)..(1167): n is a, c, g, or t
  misc_feature (1170)..(1170): n is a, c, g, or t
  misc_feature (1173)..(1173): n is a, c, g, or t
  misc_feature (1179)..(1179): n is a, c, g, or t
  misc_feature (1182)..(1182): n is a, c, g, or t
  misc_feature (1185)..(1185): n is a, c, g, or t
  misc_feature (1188)..(1188): n is a, c, g, or t
  misc_feature (1191)..(1191): n is a, c, g, or t
  misc_feature (1197)..(1197): n is a, c, g, or t
  misc_feature (1200)..(1200): n is a, c, g, or t
  misc_feature (1206)..(1206): n is a, c, g, or t
  misc_feature (1209)..(1209): n is a, c, g, or t
  misc_feature (1212)..(1212): n is a, c, g, or t
  misc_feature (1215)..(1215): n is a, c, g, or t
  misc_feature (1218)..(1218): n is a, c, g, or t
  misc_feature (1224)..(1224): n is a, c, g, or t
  misc_feature (1230)..(1230): n is a, c, g, or t
  misc_feature (1233)..(1233): n is a, c, g, or t
  misc_feature (1236)..(1236): n is a, c, g, or t
  misc_feature (1239)..(1239): n is a, c, g, or t
  misc_feature (1242)..(1242): n is a, c, g, or t
  misc_feature (1245)..(1245): n is a, c, g, or t
  misc_feature (1248)..(1248): n is a, c, g, or t
  misc_feature (1251)..(1251): n is a, c, g, or t
  misc_feature (1257)..(1257): n is a, c, g, or t
  misc_feature (1260)..(1260): n is a, c, g, or t
  misc_feature (1263)..(1263): n is a, c, g, or t
  misc_feature (1266)..(1266): n is a, c, g, or t
  misc_feature (1272)..(1272): n is a, c, g, or t
  misc_feature (1275)..(1275): n is a, c, g, or t
  misc_feature (1278)..(1278): n is a, c, g, or t
  misc_feature (1281)..(1281): n is a, c, g, or t
  misc_feature (1284)..(1284): n is a, c, g, or t
  misc_feature (1287)..(1287): n is a, c, g, or t
  misc_feature (1290)..(1290): n is a, c, g, or t
  misc_feature (1293)..(1293): n is a, c, g, or t
  misc_feature (1296)..(1296): n is a, c, g, or t
  misc_feature (1299)..(1299): n is a, c, g, or t
  misc_feature (1302)..(1302): n is a, c, g, or t
  misc_feature (1305)..(1305): n is a, c, g, or t
  misc_feature (1308)..(1308): n is a, c, g, or t
  misc_feature (1311)..(1311): n is a, c, g, or t
  misc_feature (1314)..(1314): n is a, c, g, or t
  misc_feature (1317)..(1317): n is a, c, g, or t
  misc_feature (1320)..(1320): n is a, c, g, or t
  misc_feature (1326)..(1326): n is a, c, g, or t
  misc_feature (1329)..(1329): n is a, c, g, or t
  misc_feature (1332)..(1332): n is a, c, g, or t
  misc_feature (1335)..(1335): n is a, c, g, or t
  misc_feature (1338)..(1338): n is a, c, g, or t
  misc_feature (1341)..(1341): n is a, c, g, or t
  misc_feature (1344)..(1344): n is a, c, g, or t
  misc_feature (1347)..(1347): n is a, c, g, or t
  misc_feature (1350)..(1350): n is a, c, g, or t
  misc_feature (1353)..(1353): n is a, c, g, or t
  misc_feature (1356)..(1356): n is a, c, g, or t
  misc_feature (1359)..(1359): n is a, c, g, or t
  misc_feature (1362)..(1362): n is a, c, g, or t
  misc_feature (1365)..(1365): n is a, c, g, or t
  misc_feature (1368)..(1368): n is a, c, g, or t
  misc_feature (1371)..(1371): n is a, c, g, or t
  misc_feature (1374)..(1374): n is a, c, g, or t
  misc_feature (1377)..(1377): n is a, c, g, or t
ggngarccnggnccnccnggnaarccnggnccnmgnggnccnccnggnccnccnggnttyccnggnaarccnggnatgggnaarccnggnytncayggncarccnggnccngcnggnccnccnggnttywsnmgnatgggnaargcnggnccnccnggnytnccnggnaargtnggnccnccnggncarccnggnytnmgnggngarccnggnathmgnggngaycarggnytnmgnggnccnccnggnccnccnggnytnccnggnccnwsnggnathacnathccnggnaarccnggngcncarggngtnccnggnccnccnggnttycarggngarccnggnccncarggngarccnggnccnccnggngaymgnggnytnaarggngayaayggngtnggncarccnggnytnccnggngcnccnggncarggnggngcnccnggnccnccnggnytnccnggnccngcnggnytnggnaarccnggnytngayggnytnccnggngcnccnggngayaarggngarwsnggnccnccnggngtnccnggnccnmgnggngarccnggngcngtnggnccnaarggnccnccnggngtngayggngtnggngtnccnggngcngcnggnytnccnggnccncarggnccnwsnggngcnaarggngarccnggnacnmgnggnccnccnggnytnathggnccnacnggntayggnatgccnggnytnccnggnccnaarggngaymgnggnccngcnggngtnccnggnytnytnggngaymgnggngarccnggngargayggngarccnggngarcarggnccncarggnytnggnggnccnccnggnytnccnggnwsngcnggnytnccnggnmgnmgnggnccnccnggnccnaarggngargcnggnccnggnggnccnccnggngtnccnggnathmgnggngaycarggnccnwsnggnytngcnggnaarccnggngtnccnggngarmgnggnytnccnggngcncayggnccnccnggnccnacnggnccnaarggngarccnggnttyacnggnmgnccnggnggnccnggngtngcnggngcnytnggncaraarggngayytnggnytnccnggncarccnggnytnmgnggnccnwsnggnathccnggnytncarggnccngcnggnccnathggnccncarggnytnccnggnytnaarggngarccnggnytnccnggnccnccnggngarggnmgngcnggngarccnggnacngcnggnccnacnggnccnccnggngtnccnggnwsnccnggnathacnggnccnccnggnccnccnggnccnccnggnccnccnggngcnccnggngcntty

SEQ ID NO: 1117 - DNA, 1899 bp, Artificial Sequence
  hCol-CNA22 (alpha1(IX) THD)
  misc_feature (3)..(3): n is a, c, g, or t
  misc_feature (6)..(6): n is a, c, g, or t
  misc_feature (9)..(9): n is a, c, g, or t
  misc_feature (12)..(12): n is a, c, g, or t
  misc_feature (21)..(21): n is a, c, g, or t
  misc_feature (24)..(24): n is a, c, g, or t
  misc_feature (27)..(27): n is a, c, g, or t
  misc_feature (30)..(30): n is a, c, g, or t
  misc_feature (33)..(33): n is a, c, g, or t
  misc_feature (36)..(36): n is a, c, g, or t
  misc_feature (39)..(39): n is a, c, g, or t
  misc_feature (42)..(42): n is a, c, g, or t
  misc_feature (45)..(45): n is a, c, g, or t
  misc_feature (48)..(48): n is a, c, g, or t
  misc_feature (51)..(51): n is a, c, g, or t
  misc_feature (54)..(54): n is a, c, g, or t
  misc_feature (57)..(57): n is a, c, g, or t
  misc_feature (66)..(66): n is a, c, g, or t
  misc_feature (75)..(75): n is a, c, g, or t
  misc_feature (81)..(81): n is a, c, g, or t
  misc_feature (84)..(84): n is a, c, g, or t
  misc_feature (87)..(87): n is a, c, g, or t
  misc_feature (93)..(93): n is a, c, g, or t
  misc_feature (96)..(96): n is a, c, g, or t
  misc_feature (99)..(99): n is a, c, g, or t
  misc_feature (102)..(102): n is a, c, g, or t
  misc_feature (105)..(105): n is a, c, g, or t
  misc_feature (108)..(108): n is a, c, g, or t
  misc_feature (111)..(111): n is a, c, g, or t
  misc_feature (114)..(114): n is a, c, g, or t
  misc_feature (117)..(117): n is a, c, g, or t
  misc_feature (120)..(120): n is a, c, g, or t
  misc_feature (126)..(126): n is a, c, g, or t
  misc_feature (129)..(129): n is a, c, g, or t
  misc_feature (135)..(135): n is a, c, g, or t
  misc_feature (138)..(138): n is a, c, g, or t
  misc_feature (141)..(141): n is a, c, g, or t
  misc_feature (144)..(144): n is a, c, g, or t
  misc_feature (147)..(147): n is a, c, g, or t
  misc_feature (153)..(153): n is a, c, g, or t
  misc_feature (156)..(156): n is a, c, g, or t
  misc_feature (159)..(159): n is a, c, g, or t
  misc_feature (162)..(162): n is a, c, g, or t
  misc_feature (165)..(165): n is a, c, g, or t
  misc_feature (168)..(168): n is a, c, g, or t
  misc_feature (174)..(174): n is a, c, g, or t
  misc_feature (177)..(177): n is a, c, g, or t
  misc_feature (180)..(180): n is a, c, g, or t
  misc_feature (183)..(183): n is a, c, g, or t
  misc_feature (186)..(186): n is a, c, g, or t
  misc_feature (192)..(192): n is a, c, g, or t
  misc_feature (195)..(195): n is a, c, g, or t
  misc_feature (198)..(198): n is a, c, g, or t
  misc_feature (201)..(201): n is a, c, g, or t
  misc_feature (204)..(204): n is a, c, g, or t
  misc_feature (210)..(210): n is a, c, g, or t
  misc_feature (213)..(213): n is a, c, g, or t
  misc_feature (219)..(219): n is a, c, g, or t
  misc_feature (228)..(228): n is a, c, g, or t
  misc_feature (234)..(234): n is a, c, g, or t
  misc_feature (237)..(237): n is a, c, g, or t
  misc_feature (240)..(240): n is a, c, g, or t
  misc_feature (243)..(243): n is a, c, g, or t
  misc_feature (246)..(246): n is a, c, g, or t
  misc_feature (249)..(249): n is a, c, g, or t
  misc_feature (252)..(252): n is a, c, g, or t
  misc_feature (255)..(255): n is a, c, g, or t
  misc_feature (261)..(261): n is a, c, g, or t
  misc_feature (264)..(264): n is a, c, g, or t
  misc_feature (267)..(267): n is a, c, g, or t
  misc_feature (270)..(270): n is a, c, g, or t
  misc_feature (276)..(276): n is a, c, g, or t
  misc_feature (279)..(279): n is a, c, g, or t
  misc_feature (282)..(282): n is a, c, g, or t
  misc_feature (285)..(285): n is a, c, g, or t
  misc_feature (288)..(288): n is a, c, g, or t
  misc_feature (291)..(291): n is a, c, g, or t
  misc_feature (294)..(294): n is a, c, g, or t
  misc_feature (297)..(297): n is a, c, g, or t
  misc_feature (300)..(300): n is a, c, g, or t
  misc_feature (303)..(303): n is a, c, g, or t
  misc_feature (306)..(306): n is a, c, g, or t
  misc_feature (309)..(309): n is a, c, g, or t
  misc_feature (312)..(312): n is a, c, g, or t
  misc_feature (315)..(315): n is a, c, g, or t
  misc_feature (321)..(321): n is a, c, g, or t
  misc_feature (324)..(324): n is a, c, g, or t
  misc_feature (327)..(327): n is a, c, g, or t
  misc_feature (330)..(330): n is a, c, g, or t
  misc_feature (333)..(333): n is a, c, g, or t
  misc_feature (336)..(336): n is a, c, g, or t
  misc_feature (339)..(339): n is a, c, g, or t
  misc_feature (342)..(342): n is a, c, g, or t
  misc_feature (348)..(348): n is a, c, g, or t
  misc_feature (351)..(351): n is a, c, g, or t
  misc_feature (354)..(354): n is a, c, g, or t
  misc_feature (357)..(357): n is a, c, g, or t
  misc_feature (360)..(360): n is a, c, g, or t
  misc_feature (363)..(363): n is a, c, g, or t
  misc_feature (366)..(366): n is a, c, g, or t
  misc_feature (369)..(369): n is a, c, g, or t
  misc_feature (372)..(372): n is a, c, g, or t
  misc_feature (375)..(375): n is a, c, g, or t
  misc_feature (378)..(378): n is a, c, g, or t
  misc_feature (381)..(381): n is a, c, g, or t
  misc_feature (384)..(384): n is a, c, g, or t
  misc_feature (387)..(387): n is a, c, g, or t
  misc_feature (390)..(390): n is a, c, g, or t
  misc_feature (393)..(393): n is a, c, g, or t
  misc_feature (396)..(396): n is a, c, g, or t
  misc_feature (399)..(399): n is a, c, g, or t
  misc_feature (405)..(405): n is a, c, g, or t
  misc_feature (417)..(417): n is a, c, g, or t
  misc_feature (423)..(423): n is a, c, g, or t
  misc_feature (426)..(426): n is a, c, g, or t
  misc_feature (432)..(432): n is a, c, g, or t
  misc_feature (438)..(438): n is a, c, g, or t
  misc_feature (444)..(444): n is a, c, g, or t
  misc_feature (447)..(447): n is a, c, g, or t
  misc_feature (450)..(450): n is a, c, g, or t
  misc_feature (453)..(453): n is a, c, g, or t
  misc_feature (456)..(456): n is a, c, g, or t
  misc_feature (459)..(459): n is a, c, g, or t
  misc_feature (465)..(465): n is a, c, g, or t
  misc_feature (468)..(468): n is a, c, g, or t
  misc_feature (471)..(471): n is a, c, g, or t
  misc_feature (474)..(474): n is a, c, g, or t
  misc_feature (477)..(477): n is a, c, g, or t
  misc_feature (483)..(483): n is a, c, g, or t
  misc_feature (486)..(486): n is a, c, g, or t
  misc_feature (495)..(495): n is a, c, g, or t
  misc_feature (498)..(498): n is a, c, g, or t
  misc_feature (504)..(504): n is a, c, g, or t
  misc_feature (513)..(513): n is a, c, g, or t
  misc_feature (519)..(519): n is a, c, g, or t
  misc_feature (522)..(522): n is a, c, g, or t
  misc_feature (525)..(525): n is a, c, g, or t
  misc_feature (531)..(531): n is a, c, g, or t
  misc_feature (540)..(540): n is a, c, g, or t
  misc_feature (549)..(549): n is a, c, g, or t
  misc_feature (558)..(558): n is a, c, g, or t
  misc_feature (564)..(564): n is a, c, g, or t
  misc_feature (567)..(567): n is a, c, g, or t
  misc_feature (573)..(573): n is a, c, g, or t
  misc_feature (576)..(576): n is a, c, g, or t
  misc_feature (579)..(579): n is a, c, g, or t
  misc_feature (585)..(585): n is a, c, g, or t
  misc_feature (588)..(588): n is a, c, g, or t
  misc_feature (591)..(591): n is a, c, g, or t
  misc_feature (594)..(594): n is a, c, g, or t
  misc_feature (597)..(597): n is a, c, g, or t
  misc_feature (603)..(603): n is a, c, g, or t
  misc_feature (606)..(606): n is a, c, g, or t
  misc_feature (609)..(609): n is a, c, g, or t
  misc_feature (612)..(612): n is a, c, g, or t
  misc_feature (618)..(618): n is a, c, g, or t
  misc_feature (621)..(621): n is a, c, g, or t
  misc_feature (627)..(627): n is a, c, g, or t
  misc_feature (630)..(630): n is a, c, g, or t
  misc_feature (639)..(639): n is a, c, g, or t
  misc_feature (648)..(648): n is a, c, g, or t
  misc_feature (651)..(651): n is a, c, g, or t
  misc_feature (654)..(654): n is a, c, g, or t
  misc_feature (657)..(657): n is a, c, g, or t
  misc_feature (660)..(660): n is a, c, g, or t
  misc_feature (666)..(666): n is a, c, g, or t
  misc_feature (672)..(672): n is a, c, g, or t
  misc_feature (675)..(675): n is a, c, g, or t
  misc_feature (678)..(678): n is a, c, g, or t
  misc_feature (684)..(684): n is a, c, g, or t
  misc_feature (687)..(687): n is a, c, g, or t
  misc_feature (690)..(690): n is a, c, g, or t
  misc_feature (693)..(693): n is a, c, g, or t
  misc_feature (696)..(696): n is a, c, g, or t
  misc_feature (699)..(699): n is a, c, g, or t
  misc_feature (702)..(702): n is a, c, g, or t
  misc_feature (711)..(711): n is a, c, g, or t
  misc_feature (717)..(717): n is a, c, g, or t
  misc_feature (720)..(720): n is a, c, g, or t
  misc_feature (723)..(723): n is a, c, g, or t
  misc_feature (726)..(726): n is a, c, g, or t
  misc_feature (729)..(729): n is a, c, g, or t
  misc_feature (735)..(735): n is a, c, g, or t
  misc_feature (738)..(738): n is a, c, g, or t
  misc_feature (741)..(741): n is a, c, g, or t
  misc_feature (747)..(747): n is a, c, g, or t
  misc_feature (753)..(753): n is a, c, g, or t
  misc_feature (756)..(756): n is a, c, g, or t
  misc_feature (759)..(759): n is a, c, g, or t
  misc_feature (765)..(765): n is a, c, g, or t
  misc_feature (768)..(768): n is a, c, g, or t
  misc_feature (771)..(771): n is a, c, g, or t
  misc_feature (774)..(774): n is a, c, g, or t
  misc_feature (780)..(780): n is a, c, g, or t
  misc_feature (783)..(783): n is a, c, g, or t
  misc_feature (786)..(786): n is a, c, g, or t
  misc_feature (789)..(789): n is a, c, g, or t
  misc_feature (792)..(792): n is a, c, g, or t
  misc_feature (795)..(795): n is a, c, g, or t
  misc_feature (801)..(801): n is a, c, g, or t
  misc_feature (807)..(807): n is a, c, g, or t
  misc_feature (810)..(810): n is a, c, g, or t
  misc_feature (813)..(813): n is a, c, g, or t
  misc_feature (816)..(816): n is a, c, g, or t
  misc_feature (819)..(819): n is a, c, g, or t
  misc_feature (822)..(822): n is a, c, g, or t
  misc_feature (828)..(828): n is a, c, g, or t
  misc_feature (831)..(831): n is a, c, g, or t
  misc_feature (837)..(837): n is a, c, g, or t
  misc_feature (843)..(843): n is a, c, g, or t
  misc_feature (846)..(846): n is a, c, g, or t
  misc_feature (852)..(852): n is a, c, g, or t
  misc_feature (855)..(855): n is a, c, g, or t
  misc_feature (858)..(858): n is a, c, g, or t
  misc_feature (864)..(864): n is a, c, g, or t
  misc_feature (870)..(870): n is a, c, g, or t
  misc_feature (873)..(873): n is a, c, g, or t
  misc_feature (879)..(879): n is a, c, g, or t
  misc_feature (882)..(882): n is a, c, g, or t
  misc_feature (885)..(885): n is a, c, g, or t
  misc_feature (888)..(888): n is a, c, g, or t
  misc_feature (891)..(891): n is a, c, g, or t
  misc_feature (897)..(897): n is a, c, g, or t
  misc_feature (900)..(900): n is a, c, g, or t
  misc_feature (903)..(903): n is a, c, g, or t
  misc_feature (909)..(909): n is a, c, g, or t
  misc_feature (912)..(912): n is a, c, g, or t
  misc_feature (915)..(915): n is a, c, g, or t
  misc_feature (918)..(918): n is a, c, g, or t
  misc_feature (921)..(921): n is a, c, g, or t
  misc_feature (924)..(924): n is a, c, g, or t
  misc_feature (927)..(927): n is a, c, g, or t
  misc_feature (933)..(933): n is a, c, g, or t
  misc_feature (936)..(936): n is a, c, g, or t
  misc_feature (939)..(939): n is a, c, g, or t
  misc_feature (945)..(945): n is a, c, g, or t
  misc_feature (948)..(948): n is a, c, g, or t
  misc_feature (951)..(951): n is a, c, g, or t
  misc_feature (954)..(954): n is a, c, g, or t
  misc_feature (963)..(963): n is a, c, g, or t
  misc_feature (966)..(966): n is a, c, g, or t
  misc_feature (969)..(969): n is a, c, g, or t
  misc_feature (972)..(972): n is a, c, g, or t
  misc_feature (975)..(975): n is a, c, g, or t
  misc_feature (978)..(978): n is a, c, g, or t
  misc_feature (981)..(981): n is a, c, g, or t
  misc_feature (987)..(987): n is a, c, g, or t
  misc_feature (990)..(990): n is a, c, g, or t
  misc_feature (999)..(999): n is a, c, g, or t
  misc_feature (1005)..(1005): n is a, c, g, or t
  misc_feature (1008)..(1008): n is a, c, g, or t
  misc_feature (1014)..(1014): n is a, c, g, or t
  misc_feature (1017)..(1017): n is a, c, g, or t
  misc_feature (1026)..(1026): n is a, c, g, or t
  misc_feature (1029)..(1029): n is a, c, g, or t
  misc_feature (1032)..(1032): n is a, c, g, or t
  misc_feature (1035)..(1035): n is a, c, g, or t
  misc_feature (1041)..(1041): n is a, c, g, or t
  misc_feature (1044)..(1044): n is a, c, g, or t
  misc_feature (1047)..(1047): n is a, c, g, or t
  misc_feature (1050)..(1050): n is a, c, g, or t
  misc_feature (1053)..(1053): n is a, c, g, or t
  misc_feature (1056)..(1056): n is a, c, g, or t
  misc_feature (1062)..(1062): n is a, c, g, or t
  misc_feature (1065)..(1065): n is a, c, g, or t
  misc_feature (1068)..(1068): n is a, c, g, or t
  misc_feature (1071)..(1071): n is a, c, g, or t
  misc_feature (1074)..(1074): n is a, c, g, or t
  misc_feature (1077)..(1077): n is a, c, g, or t
  misc_feature (1080)..(1080): n is a, c, g, or t
  misc_feature (1086)..(1086): n is a, c, g, or t
  misc_feature (1089)..(1089): n is a, c, g, or t
  misc_feature (1092)..(1092): n is a, c, g, or t
  misc_feature (1095)..(1095): n is a, c, g, or t
  misc_feature (1098)..(1098): n is a, c, g, or t
  misc_feature (1101)..(1101): n is a, c, g, or t
  misc_feature (1104)..(1104): n is a, c, g, or t
  misc_feature (1107)..(1107): n is a, c, g, or t
  misc_feature (1110)..(1110): n is a, c, g, or t
  misc_feature (1113)..(1113): n is a, c, g, or t
  misc_feature (1116)..(1116): n is a, c, g, or t
  misc_feature (1122)..(1122): n is a, c, g, or t
  misc_feature (1125)..(1125): n is a, c, g, or t
  misc_feature (1128)..(1128): n is a, c, g, or t
  misc_feature (1131)..(1131): n is a, c, g, or t
  misc_feature (1134)..(1134): n is a, c, g, or t
  misc_feature (1137)..(1137): n is a, c, g, or t
  misc_feature (1140)..(1140): n is a, c, g, or t
  misc_feature (1143)..(1143): n is a, c, g, or t
  misc_feature (1146)..(1146): n is a, c, g, or t
  misc_feature (1149)..(1149): n is a, c, g, or t
  misc_feature (1152)..(1152): n is a, c, g, or t
  misc_feature (1155)..(1155): n is a, c, g, or t
  misc_feature (1158)..(1158): n is a, c, g, or t
  misc_feature (1161)..(1161): n is a, c, g, or t
  misc_feature (1164)..(1164): n is a, c, g, or t
  misc_feature (1167)..(1167): n is a, c, g, or t
  misc_feature (1170)..(1170): n is a, c, g, or t
  misc_feature (1173)..(1173): n is a, c, g, or t
  misc_feature (1176)..(1176): n is a, c, g, or t
  misc_feature (1179)..(1179): n is a, c, g, or t
  misc_feature (1188)..(1188): n is a, c, g, or t
  misc_feature (1194)..(1194): n is a, c, g, or t
  misc_feature (1197)..(1197): n is a, c, g, or t
  misc_feature (1200)..(1200): n is a, c, g, or t
  misc_feature (1203)..(1203): n is a, c, g, or t
  misc_feature (1206)..(1206): n is a, c, g, or t
  misc_feature (1212)..(1212): n is a, c, g, or t
  misc_feature (1215)..(1215): n is a, c, g, or t
  misc_feature (1218)..(1218): n is a, c, g, or t
  misc_feature (1224)..(1224): n is a, c, g, or t
  misc_feature (1233)..(1233): n is a, c, g, or t
  misc_feature (1236)..(1236): n is a, c, g, or t
  misc_feature (1239)..(1239): n is a, c, g, or t
  misc_feature (1242)..(1242): n is a, c, g, or t
  misc_feature (1251)..(1251): n is a, c, g, or t
  misc_feature (1257)..(1257): n is a, c, g, or t
  misc_feature (1260)..(1260): n is a, c, g, or t
  misc_feature (1266)..(1266): n is a, c, g, or t
  misc_feature (1269)..(1269): n is a, c, g, or t
  misc_feature (1275)..(1275): n is a, c, g, or t
  misc_feature (1278)..(1278): n is a, c, g, or t
  misc_feature (1287)..(1287): n is a, c, g, or t
  misc_feature (1290)..(1290): n is a, c, g, or t
  misc_feature (1293)..(1293): n is a, c, g, or t
  misc_feature (1296)..(1296): n is a, c, g, or t
  misc_feature (1299)..(1299): n is a, c, g, or t
  misc_feature (1305)..(1305): n is a, c, g, or t
  misc_feature (1308)..(1308): n is a, c, g, or t
  misc_feature (1311)..(1311): n is a, c, g, or t
  misc_feature (1314)..(1314): n is a, c, g, or t
  misc_feature (1320)..(1320): n is a, c, g, or t
  misc_feature (1323)..(1323): n is a, c, g, or t
  misc_feature (1329)..(1329): n is a, c, g, or t
  misc_feature (1332)..(1332): n is a, c, g, or t
  misc_feature (1335)..(1335): n is a, c, g, or t
  misc_feature (1338)..(1338): n is a, c, g, or t
  misc_feature (1341)..(1341): n is a, c, g, or t
  misc_feature (1344)..(1344): n is a, c, g, or t
  misc_feature (1350)..(1350): n is a, c, g, or t
  misc_feature (1353)..(1353): n is a, c, g, or t
  misc_feature (1356)..(1356): n is a, c, g, or t
  misc_feature (1359)..(1359): n is a, c, g, or t
  misc_feature (1362)..(1362): n is a, c, g, or t
  misc_feature (1365)..(1365): n is a, c, g, or t
  misc_feature (1368)..(1368): n is a, c, g, or t
  misc_feature (1371)..(1371): n is a, c, g, or t
  misc_feature (1377)..(1377): n is a, c, g, or t
  misc_feature (1380)..(1380): n is a, c, g, or t
  misc_feature (1383)..(1383): n is a, c, g, or t
  misc_feature (1386)..(1386): n is a, c, g, or t
  misc_feature (1389)..(1389): n is a, c, g, or t
  misc_feature (1392)..(1392): n is a, c, g, or t
  misc_feature (1395)..(1395): n is a, c, g, or t
  misc_feature (1398)..(1398): n is a, c, g, or t
  misc_feature (1401)..(1401): n is a, c, g, or t
  misc_feature (1404)..(1404): n is a, c, g, or t
  misc_feature (1407)..(1407): n is a, c, g, or t
  misc_feature (1413)..(1413): n is a, c, g, or t
  misc_feature (1422)..(1422): n is a, c, g, or t
  misc_feature (1425)..(1425): n is a, c, g, or t
  misc_feature (1428)..(1428): n is a, c, g, or t
  misc_feature (1431)..(1431): n is a, c, g, or t
  misc_feature (1434)..(1434): n is a, c, g, or t
  misc_feature (1437)..(1437): n is a, c, g, or t
  misc_feature (1440)..(1440): n is a, c, g, or t
  misc_feature (1443)..(1443): n is a, c, g, or t
  misc_feature (1449)..(1449): n is a, c, g, or t
  misc_feature (1452)..(1452): n is a, c, g, or t
  misc_feature (1455)..(1455): n is a, c, g, or t
  misc_feature (1458)..(1458): n is a, c, g, or t
  misc_feature (1461)..(1461): n is a, c, g, or t
  misc_feature (1464)..(1464): n is a, c, g, or t
  misc_feature (1467)..(1467): n is a, c, g, or t
  misc_feature (1470)..(1470): n is a, c, g, or t
  misc_feature (1491)..(1491): n is a, c, g, or t
  misc_feature (1500)..(1500): n is a, c, g, or t
  misc_feature (1503)..(1503): n is a, c, g, or t
  misc_feature (1521)..(1521): n is a, c, g, or t
  misc_feature (1530)..(1530): n is a, c, g, or t
  misc_feature (1533)..(1533): n is a, c, g, or t
  misc_feature (1536)..(1536): n is a, c, g, or t
  misc_feature (1539)..(1539): n is a, c, g, or t
  misc_feature (1545)..(1545): n is a, c, g, or t
  misc_feature (1548)..(1548): n is a, c, g, or t
  misc_feature (1554)..(1554): n is a, c, g, or t
  misc_feature (1557)..(1557): n is a, c, g, or t
  misc_feature (1560)..(1560): n is a, c, g, or t
  misc_feature (1563)..(1563): n is a, c, g, or t
  misc_feature (1566)..(1566): n is a, c, g, or t
  misc_feature (1569)..(1569): n is a, c, g, or t
  misc_feature (1572)..(1572): n is a, c, g, or t
  misc_feature (1575)..(1575): n is a, c, g, or t
  misc_feature (1578)..(1578): n is a, c, g, or t
  misc_feature (1581)..(1581): n is a, c, g, or t
  misc_feature (1584)..(1584): n is a, c, g, or t
  misc_feature (1587)..(1587): n is a, c, g, or t
  misc_feature (1590)..(1590): n is a, c, g, or t
  misc_feature (1593)..(1593): n is a, c, g, or t
  misc_feature (1596)..(1596): n is a, c, g, or t
  misc_feature (1599)..(1599): n is a, c, g, or t
  misc_feature (1602)..(1602): n is a, c, g, or t
  misc_feature (1605)..(1605): n is a, c, g, or t
  misc_feature (1608)..(1608): n is a, c, g, or t
  misc_feature (1611)..(1611): n is a, c, g, or t
  misc_feature (1620)..(1620): n is a, c, g, or t
  misc_feature (1626)..(1626): n is a, c, g, or t
  misc_feature (1629)..(1629): n is a, c, g, or t
  misc_feature (1638)..(1638): n is a, c, g, or t
  misc_feature (1644)..(1644): n is a, c, g, or t
  misc_feature (1647)..(1647): n is a, c, g, or t
  misc_feature (1650)..(1650): n is a, c, g, or t
  misc_feature (1653)..(1653): n is a, c, g, or t
  misc_feature (1656)..(1656): n is a, c, g, or t
  misc_feature (1665)..(1665): n is a, c, g, or t
  misc_feature (1668)..(1668): n is a, c, g, or t
  misc_feature (1671)..(1671): n is a, c, g, or t
  misc_feature (1674)..(1674): n is a, c, g, or t
  misc_feature (1677)..(1677): n is a, c, g, or t
  misc_feature (1680)..(1680): n is a, c, g, or t
  misc_feature (1683)..(1683): n is a, c, g, or t
  misc_feature (1686)..(1686): n is a, c, g, or t
  misc_feature (1689)..(1689): n is a, c, g, or t
  misc_feature (1692)..(1692): n is a, c, g, or t
  misc_feature (1695)..(1695): n is a, c, g, or t
  misc_feature (1701)..(1701): n is a, c, g, or t
  misc_feature (1707)..(1707): n is a, c, g, or t
  misc_feature (1710)..(1710): n is a, c, g, or t
  misc_feature (1719)..(1719): n is a, c, g, or t
  misc_feature (1725)..(1725): n is a, c, g, or t
  misc_feature (1728)..(1728): n is a, c, g, or t
  misc_feature (1731)..(1731): n is a, c, g, or t
  misc_feature (1734)..(1734): n is a, c, g, or t
  misc_feature (1737)..(1737): n is a, c, g, or t
  misc_feature (1740)..(1740): n is a, c, g, or t
  misc_feature (1743)..(1743): n is a, c, g, or t
  misc_feature (1746)..(1746): n is a, c, g, or t
  misc_feature (1752)..(1752): n is a, c, g, or t
  misc_feature (1755)..(1755): n is a, c, g, or t
  misc_feature (1758)..(1758): n is a, c, g, or t
  misc_feature (1761)..(1761): n is a, c, g, or t
  misc_feature (1764)..(1764): n is a, c, g, or t
  misc_feature (1770)..(1770): n is a, c, g, or t
  misc_feature (1773)..(1773): n is a, c, g, or t
  misc_feature (1776)..(1776): n is a, c, g, or t
  misc_feature (1779)..(1779): n is a, c, g, or t
  misc_feature (1785)..(1785): n is a, c, g, or t
  misc_feature (1788)..(1788): n is a, c, g, or t
  misc_feature (1791)..(1791): n is a, c, g, or t
  misc_feature (1794)..(1794): n is a, c, g, or t
  misc_feature (1797)..(1797): n is a, c, g, or t
  misc_feature (1803)..(1803): n is a, c, g, or t
  misc_feature (1806)..(1806): n is a, c, g, or t
  misc_feature (1812)..(1812): n is a, c, g, or t
  misc_feature (1815)..(1815): n is a, c, g, or t
  misc_feature (1821)..(1821): n is a, c, g, or t
  misc_feature (1827)..(1827): n is a, c, g, or t
  misc_feature (1830)..(1830): n is a, c, g, or t
  misc_feature (1833)..(1833): n is a, c, g, or t
  misc_feature (1836)..(1836): n is a, c, g, or t
  misc_feature (1839)..(1839): n is a, c, g, or t
  misc_feature (1842)..(1842): n is a, c, g, or t
  misc_feature (1845)..(1845): n is a, c, g, or t
  misc_feature (1848)..(1848): n is a, c, g, or t
  misc_feature (1854)..(1854): n is a, c, g, or t
  misc_feature (1857)..(1857): n is a, c, g, or t
  misc_feature (1860)..(1860): n is a, c, g, or t
  misc_feature (1863)..(1863): n is a, c, g, or t
  misc_feature (1866)..(1866): n is a, c, g, or t
  misc_feature (1869)..(1869): n is a, c, g, or t
  misc_feature (1872)..(1872): n is a, c, g, or t
  misc_feature (1875)..(1875): n is a, c, g, or t
  misc_feature (1878)..(1878): n is a, c, g, or t
  misc_feature (1881)..(1881): n is a, c, g, or t
  misc_feature (1884)..(1884): n is a, c, g, or t
  misc_feature (1887)..(1887): n is a, c, g, or t
  misc_feature (1890)..(1890): n is a, c, g, or t
  misc_feature (1893)..(1893): n is a, c, g, or t
ggnccnccnggngarcarggnccnccnggnccnccnggnccnccnggngtnccnggnathgayggnathgayggngaymgnggnccnaarggnccnccnggnccnccnggnccngcnggngarccnggnaarccnggngcnccnggnaarccnggnacnccnggngcngayggnytnacnggnccngayggnwsnccnggnwsnathggnwsnaarggncaraarggngarccnggngtnccnggnwsnmgnggnttyccnggnmgnggnathccnggnccnccnggnccnccnggnacngcnggnytnccnggngarytnggnmgngtnggnccngtnggngayccnggnmgnmgnggnccnccnggnccnccnggnccnccnggnccnmgnggnacnathggnttycaygayggngayccnytntgyccnaaygcntgyccnccnggnmgnwsnggntayccnggnytnccnggnatgmgnggncayaarggngcnaarggngarathggngarccnggnmgncarggncayaarggngargarggngaycarggngarytnggngargtnggngcncarggnccnccnggngcncarggnytnmgnggnathacnggnathgtnggngayaarggngaraarggngcnmgnggnytngayggngarccnggnccncarggnytnccnggngcnccnggngaycarggncarmgnggnccnccnggngargcnggnccnaarggngaymgnggngcngarggngcnmgnggnathccnggnytnccnggnccnaarggngayacnggnytnccnggngtngayggnmgngayggnathccnggnatgccnggnacnaarggngarccnggnaarccnggnccnccnggngaygcnggnytncarggnytnccnggngtnccnggnathccnggngcnaarggngtngcnggngaraarggnwsnacnggngcnccnggnaarccnggncaratgggnaaywsnggnaarccnggncarcarggnccnccnggngargtnggnccnmgnggnccncarggnytnccnggnwsnmgnggngarytnggnccngtnggnwsnccnggnytnccnggnaarytnggnwsnytnggnwsnccnggnytnccnggnytnccnggnccnccnggnytnccnggnatgaarggngaymgnggngtngtnggngarccnggnccnaarggngarcarggngcnwsnggngargarggngargcnggngarmgnggngarytnggngayathggnytnccnggnccnaarggnwsngcnggnaayccnggngarccnggnytnmgnggnccngarggnwsnmgnggnytnccnggngtngarggnccnmgnggnccnccnggnccnmgnggngtncarggngarcarggngcnacnggnytnccnggngtncarggnccnccnggnmgngcnccnacngaycarcayathaarcargtntgyatgmgngtnathcargarcayttygcngaratggcngcnwsnytnaarmgnccngaywsnggngcnacnggnytnccnggnmgnccnggnccnccnggnccnccnggnccnccnggngaraayggnttyccnggncaratgggnathmgnggnytnccnggnathaarggnccnccnggngcnytnggnytnmgnggnccnaarggngayytnggngaraarggngarmgnggnccnccnggnmgnggnccnaayggnytnccnggngcnathggnytnccnggngayccnggnccngcnwsntayggnmgnaayggnmgngayggngarmgnggnccnccnggngtngcnggnathccnggngtnccnggnccnccnggnccnccnggnytnccnggnttytgy

SEQ ID NO: 1118 - DNA, 1452 bp, Artificial Sequence
  hCol-CNA23 (alpha2(IX) THD)
  misc_feature (3)..(3): n is a, c, g, or t
  misc_feature (12)..(12): n is a, c, g, or t
  misc_feature (15)..(15): n is a, c, g, or t
  misc_feature (18)..(18): n is a, c, g, or t
  misc_feature (21)..(21): n is a, c, g, or t
  misc_feature (24)..(24): n is a, c, g, or t
  misc_feature (30)..(30): n is a, c, g, or t
  misc_feature (33)..(33): n is a, c, g, or t
  misc_feature (39)..(39): n is a, c, g, or t
  misc_feature (45)..(45): n is a, c, g, or t
  misc_feature (48)..(48): n is a, c, g, or t
  misc_feature (54)..(54): n is a, c, g, or t
  misc_feature (57)..(57): n is a, c, g, or t
  misc_feature (63)..(63): n is a, c, g, or t
  misc_feature (66)..(66): n is a, c, g, or t
  misc_feature (72)..(72): n is a, c, g, or t
  misc_feature (75)..(75): n is a, c, g, or t
  misc_feature (84)..(84): n is a, c, g, or t
  misc_feature (90)..(90): n is a, c, g, or t
  misc_feature (93)..(93): n is a, c, g, or t
  misc_feature (96)..(96): n is a, c, g, or t
  misc_feature (102)..(102): n is a, c, g, or t
  misc_feature (108)..(108): n is a, c, g, or t
  misc_feature (111)..(111): n is a, c, g, or t
  misc_feature (114)..(114): n is a, c, g, or t
  misc_feature (117)..(117): n is a, c, g, or t
  misc_feature (120)..(120): n is a, c, g, or t
  misc_feature (129)..(129): n is a, c, g, or t
  misc_feature (135)..(135): n is a, c, g, or t
  misc_feature (138)..(138): n is a, c, g, or t
  misc_feature (141)..(141): n is a, c, g, or t
  misc_feature (144)..(144): n is a, c, g, or t
  misc_feature (147)..(147): n is a, c, g, or t
  misc_feature (150)..(150): n is a, c, g, or t
  misc_feature (156)..(156): n is a, c, g, or t
  misc_feature (162)..(162): n is a, c, g, or t
  misc_feature (165)..(165): n is a, c, g, or t
  misc_feature (171)..(171): n is a, c, g, or t
  misc_feature (174)..(174): n is a, c, g, or t
  misc_feature (180)..(180): n is a, c, g, or t
  misc_feature (183)..(183): n is a, c, g, or t
  misc_feature (186)..(186): n is a, c, g, or t
  misc_feature (192)..(192): n is a, c, g, or t
  misc_feature (198)..(198): n is a, c, g, or t
  misc_feature (201)..(201): n is a, c, g, or t
  misc_feature (204)..(204): n is a, c, g, or t
  misc_feature (210)..(210): n is a, c, g, or t
  misc_feature (219)..(219): n is a, c, g, or t
  misc_feature (225)..(225): n is a, c, g, or t
  misc_feature (228)..(228): n is a, c, g, or t
  misc_feature (231)..(231): n is a, c, g, or t
  misc_feature (237)..(237): n is a, c, g, or t
  misc_feature (240)..(240): n is a, c, g, or t
  misc_feature (243)..(243): n is a, c, g, or t
  misc_feature (246)..(246): n is a, c, g, or t
  misc_feature (249)..(249): n is a, c, g, or t
  misc_feature (252)..(252): n is a, c, g, or t
  misc_feature (255)..(255): n is a, c, g, or t
  misc_feature (264)..(264): n is a, c, g, or t
  misc_feature (267)..(267): n is a, c, g, or t
  misc_feature (270)..(270): n is a, c, g, or t
  misc_feature (273)..(273): n is a, c, g, or t
  misc_feature (276)..(276): n is a, c, g, or t
  misc_feature (279)..(279): n is a, c, g, or t
  misc_feature (282)..(282): n is a, c, g, or t
  misc_feature (285)..(285): n is a, c, g, or t
  misc_feature (288)..(288): n is a, c, g, or t
  misc_feature (291)..(291): n is a, c, g, or t
  misc_feature (300)..(300): n is a, c, g, or t
  misc_feature (309)..(309): n is a, c, g, or t
  misc_feature (312)..(312): n is a, c, g, or t
  misc_feature (315)..(315): n is a, c, g, or t
  misc_feature (318)..(318): n is a, c, g, or t
  misc_feature (324)..(324): n is a, c, g, or t
  misc_feature (327)..(327): n is a, c, g, or t
  misc_feature (330)..(330): n is a, c, g, or t
  misc_feature (336)..(336): n is a, c, g, or t
  misc_feature (342)..(342): n is a, c, g, or t
  misc_feature (345)..(345): n is a, c, g, or t
  misc_feature (348)..(348): n is a, c, g, or t
  misc_feature (354)..(354): n is a, c, g, or t
  misc_feature (357)..(357): n is a, c, g, or t
  misc_feature (360)..(360): n is a, c, g, or t
  misc_feature (363)..(363): n is a, c, g, or t
  misc_feature (366)..(366): n is a, c, g, or t
  misc_feature (369)..(369): n is a, c, g, or t
  misc_feature (372)..(372): n is a, c, g, or t
  misc_feature (381)..(381): n is a, c, g, or t
  misc_feature (390)..(390): n is a, c, g, or t
  misc_feature (393)..(393): n is a, c, g, or t
  misc_feature (396)..(396): n is a, c, g, or t
  misc_feature (399)..(399): n is a, c, g, or t
  misc_feature (402)..(402): n is a, c, g, or t
  misc_feature (405)..(405): n is a, c, g, or t
  misc_feature (408)..(408): n is a, c, g, or t
  misc_feature (417)..(417): n is a, c, g, or t
  misc_feature (420)..(420): n is a, c, g, or t
  misc_feature (423)..(423): n is a, c, g, or t
  misc_feature (426)..(426): n is a, c, g, or t
  misc_feature (432)..(432): n is a, c, g, or t
  misc_feature (435)..(435): n is a, c, g, or t
  misc_feature (441)..(441): n is a, c, g, or t
  misc_feature (444)..(444): n is a, c, g, or t
  misc_feature (447)..(447): n is a, c, g, or t
  misc_feature (450)..(450): n is a, c, g, or t
  misc_feature (453)..(453): n is a, c, g, or t
  misc_feature (462)..(462): n is a, c, g, or t
  misc_feature (465)..(465): n is a, c, g, or t
  misc_feature (468)..(468): n is a, c, g, or t
  misc_feature (471)..(471): n is a, c, g, or t
  misc_feature (474)..(474): n is a, c, g, or t
  misc_feature (477)..(477): n is a, c, g, or t
  misc_feature (480)..(480): n is a, c, g, or t
  misc_feature (486)..(486): n is a, c, g, or t
  misc_feature (489)..(489): n is a, c, g, or t
  misc_feature (492)..(492): n is a, c, g, or t
  misc_feature (498)..(498): n is a, c, g, or t
  misc_feature (501)..(501): n is a, c, g, or t
  misc_feature (504)..(504): n is a, c, g, or t
  misc_feature (507)..(507): n is a, c, g, or t
  misc_feature (516)..(516): n is a, c, g, or t
  misc_feature (522)..(522): n is a, c, g, or t
  misc_feature (525)..(525): n is a, c, g, or t
  misc_feature (528)..(528): n is a, c, g, or t
  misc_feature (534)..(534): n is a, c, g, or t
  misc_feature (537)..(537): n is a, c, g, or t
  misc_feature (540)..(540): n is a, c, g, or t
  misc_feature (543)..(543): n is a, c, g, or t
  misc_feature (549)..(549): n is a, c, g, or t
  misc_feature (552)..(552): n is a, c, g, or t
  misc_feature (555)..(555): n is a, c, g, or t
  misc_feature (558)..(558): n is a, c, g, or t
  misc_feature (561)..(561): n is a, c, g, or t
  misc_feature (570)..(570): n is a, c, g, or t
  misc_feature (576)..(576): n is a, c, g, or t
  misc_feature (579)..(579): n is a, c, g, or t
  misc_feature (582)..(582): n is a, c, g, or t
  misc_feature (585)..(585): n is a, c, g, or t
  misc_feature (588)..(588): n is a, c, g, or t
  misc_feature (597)..(597): n is a, c, g, or t
  misc_feature (600)..(600): n is a, c, g, or t
  misc_feature (606)..(606): n is a, c, g, or t
  misc_feature (615)..(615): n is a, c, g, or t
  misc_feature (624)..(624): n is a, c, g, or t
  misc_feature (633)..(633): n is a, c, g, or t
  misc_feature (639)..(639): n is a, c, g, or t
  misc_feature (642)..(642): n is a, c, g, or t
  misc_feature (645)..(645): n is a, c, g, or t
  misc_feature (648)..(648): n is a, c, g, or t
  misc_feature (651)..(651): n is a, c, g, or t
  misc_feature (657)..(657): n is a, c, g, or t
  misc_feature (660)..(660): n is a, c, g, or t
  misc_feature (663)..(663): n is a, c, g, or t
  misc_feature (669)..(669): n is a, c, g, or t
  misc_feature (672)..(672): n is a, c, g, or t
  misc_feature (678)..(678): n is a, c, g, or t
  misc_feature (681)..(681): n is a, c, g, or t
  misc_feature (687)..(687): n is a, c, g, or t
  misc_feature (696)..(696): n is a, c, g, or t
  misc_feature (699)..(699): n is a, c, g, or t
  misc_feature (702)..(702): n is a, c, g, or t
  misc_feature (705)..(705): n is a, c, g, or t
  misc_feature (711)..(711): n is a, c, g, or t
  misc_feature (714)..(714): n is a, c, g, or t
  misc_feature (717)..(717): n is a, c, g, or t
  misc_feature (723)..(723): n is a, c, g, or t
  misc_feature (726)..(726): n is a, c, g, or t
  misc_feature (729)..(729): n is a, c, g, or t
  misc_feature (732)..(732): n is a, c, g, or t
  misc_feature (735)..(735): n is a, c, g, or t
  misc_feature (741)..(741): n is a, c, g, or t
  misc_feature (750)..(750): n is a, c, g, or t
  misc_feature (753)..(753): n is a, c, g, or t
  misc_feature (756)..(756): n is a, c, g, or t
  misc_feature (759)..(759): n is a, c, g, or t
  misc_feature (765)..(765): n is a, c, g, or t
  misc_feature (768)..(768): n is a, c, g, or t
  misc_feature (771)..(771): n is a, c, g, or t
  misc_feature (774)..(774): n is a, c, g, or t
  misc_feature (777)..(777): n is a, c, g, or t
  misc_feature (783)..(783): n is a, c, g, or t
  misc_feature (786)..(786): n is a, c, g, or t
  misc_feature (792)..(792): n is a, c, g, or t
  misc_feature (795)..(795): n is a, c, g, or t
  misc_feature (798)..(798): n is a, c, g, or t
  misc_feature (801)..(801): n is a, c, g, or t
  misc_feature (804)..(804): n is a, c, g, or t
  misc_feature (807)..(807): n is a, c, g, or t
  misc_feature (810)..(810): n is a, c, g, or t
  misc_feature (813)..(813): n is a, c, g, or t
  misc_feature (822)..(822): n is a, c, g, or t
  misc_feature (831)..(831): n is a, c, g, or t
  misc_feature (837)..(837): n is a, c, g, or t
  misc_feature (840)..(840): n is a, c, g, or t
  misc_feature (846)..(846): n is a, c, g, or t
  misc_feature (849)..(849): n is a, c, g, or t
  misc_feature (852)..(852): n is a, c, g, or t
  misc_feature (858)..(858): n is a, c, g, or t
  misc_feature (867)..(867): n is a, c, g, or t
  misc_feature (870)..(870): n is a, c, g, or t
  misc_feature (873)..(873): n is a, c, g, or t
  misc_feature (876)..(876): n is a, c, g, or t
  misc_feature (882)..(882): n is a, c, g, or t
  misc_feature (885)..(885): n is a, c, g, or t
  misc_feature (891)..(891): n is a, c, g, or t
  misc_feature (894)..(894): n is a, c, g, or t
  misc_feature (897)..(897): n is a, c, g, or t
  misc_feature (900)..(900): n is a, c, g, or t
  misc_feature (903)..(903): n is a, c, g, or t
  misc_feature (909)..(909): n is a, c, g, or t
  misc_feature (912)..(912): n is a, c, g, or t
  misc_feature (915)..(915): n is a, c, g, or t
  misc_feature (918)..(918): n is a, c, g, or t
  misc_feature (921)..(921): n is a, c, g, or t
  misc_feature (924)..(924): n is a, c, g, or t
  misc_feature (930)..(930): n is a, c, g, or t
  misc_feature (936)..(936): n is a, c, g, or t
  misc_feature (939)..(939): n is a, c, g, or t
  misc_feature (942)..(942): n is a, c, g, or t
  misc_feature (945)..(945): n is a, c, g, or t
  misc_feature (948)..(948): n is a, c, g, or t
  misc_feature (951)..(951): n is a, c, g, or t
  misc_feature (954)..(954): n is a, c, g, or t
  misc_feature (957)..(957): n is a, c, g, or t
  misc_feature (960)..(960): n is a, c, g, or t
  misc_feature (963)..(963): n is a, c, g, or t
  misc_feature (966)..(966): n is a, c, g, or t
  misc_feature (972)..(972): n is a, c, g, or t
  misc_feature (975)..(975): n is a, c, g, or t
  misc_feature (978)..(978): n is a, c, g, or t
  misc_feature (981)..(981): n is a, c, g, or t
  misc_feature (984)..(984): n is a, c, g, or t
  misc_feature (990)..(990): n is a, c, g, or t
  misc_feature (993)..(993): n is a, c, g, or t
  misc_feature (996)..(996): n is a, c, g, or t
  misc_feature (1002)..(1002): n is a, c, g, or t
  misc_feature (1005)..(1005): n is a, c, g, or t
  misc_feature (1011)..(1011): n is a, c, g, or t
  misc_feature (1014)..(1014): n is a, c, g, or t
  misc_feature (1020)..(1020): n is a, c, g, or t
  misc_feature (1023)..(1023): n is a, c, g, or t
  misc_feature (1038)..(1038): n is a, c, g, or t
  misc_feature (1044)..(1044): n is a, c, g, or t
  misc_feature (1047)..(1047): n is a, c, g, or t
  misc_feature (1050)..(1050): n is a, c, g, or t
  misc_feature (1059)..(1059): n is a, c, g, or t
  misc_feature (1071)..(1071): n is a, c, g, or t
  misc_feature (1074)..(1074): n is a, c, g, or t
  misc_feature (1080)..(1080): n is a, c, g, or t
  misc_feature (1083)..(1083): n is a, c, g, or t
  misc_feature (1086)..(1086): n is a, c, g, or t
  misc_feature (1089)..(1089): n is a, c, g, or t
  misc_feature (1092)..(1092): n is a, c, g, or t
  misc_feature (1098)..(1098): n is a, c, g, or t
  misc_feature (1104)..(1104): n is a, c, g, or t
  misc_feature (1107)..(1107): n is a, c, g, or t
  misc_feature (1110)..(1110): n is a, c, g, or t
  misc_feature (1113)..(1113): n is a, c, g, or t
  misc_feature (1116)..(1116): n is a, c, g, or t
  misc_feature (1119)..(1119): n is a, c, g, or t
  misc_feature (1128)..(1128): n is a, c, g, or t
  misc_feature (1131)..(1131): n is a, c, g, or t
  misc_feature (1134)..(1134): n is a, c, g, or t
  misc_feature (1137)..(1137): n is a, c, g, or t
  misc_feature (1140)..(1140): n is a, c, g, or t
  misc_feature (1143)..(1143): n is a, c, g, or t
  misc_feature (1146)..(1146): n is a, c, g, or t
  misc_feature (1149)..(1149): n is a, c, g, or t
  misc_feature (1152)..(1152): n is a, c, g, or t
  misc_feature (1155)..(1155): n is a, c, g, or t
  misc_feature (1161)..(1161): n is a, c, g, or t
  misc_feature (1164)..(1164): n is a, c, g, or t
  misc_feature (1173)..(1173): n is a, c, g, or t
  misc_feature (1176)..(1176): n is a, c, g, or t
  misc_feature (1182)..(1182): n is a, c, g, or t
  misc_feature (1188)..(1188): n is a, c, g, or t
  misc_feature (1191)..(1191): n is a, c, g, or t
  misc_feature (1194)..(1194): n is a, c, g, or t
  misc_feature (1197)..(1197): n is a, c, g, or t
  misc_feature (1200)..(1200): n is a, c, g, or t
  misc_feature (1203)..(1203): n is a, c, g, or t
  misc_feature (1206)..(1206): n is a, c, g, or t
  misc_feature (1209)..(1209): n is a, c, g, or t
  misc_feature (1215)..(1215): n is a, c, g, or t
  misc_feature (1218)..(1218): n is a, c, g, or t
  misc_feature (1221)..(1221): n is a, c, g, or t
  misc_feature (1224)..(1224): n is a, c, g, or t
  misc_feature (1227)..(1227): n is a, c, g, or t
  misc_feature (1236)..(1236): n is a, c, g, or t
  misc_feature (1242)..(1242): n is a, c, g, or t
  misc_feature (1245)..(1245): n is a, c, g, or t
  misc_feature (1248)..(1248): n is a, c, g, or t
  misc_feature (1254)..(1254): n is a, c, g, or t
  misc_feature (1260)..(1260): n is a, c, g, or t
  misc_feature (1263)..(1263): n is a, c, g, or t
  misc_feature (1272)..(1272): n is a, c, g, or t
  misc_feature (1278)..(1278): n is a, c, g, or t
  misc_feature (1281)..(1281): n is a, c, g, or t
  misc_feature (1287)..(1287): n is a, c, g, or t
  misc_feature (1290)..(1290): n is a, c, g, or t
  misc_feature (1293)..(1293): n is a, c, g, or t
  misc_feature (1296)..(1296): n is a, c, g, or t
  misc_feature (1302)..(1302): n is a, c, g, or t
  misc_feature (1305)..(1305): n is a, c, g, or t
  misc_feature (1311)..(1311): n is a, c, g, or t
  misc_feature (1314)..(1314): n is a, c, g, or t
  misc_feature (1317)..(1317): n is a, c, g, or t
  misc_feature (1320)..(1320): n is a, c, g, or t
  misc_feature (1323)..(1323): n is a, c, g, or t
  misc_feature (1329)..(1329): n is a, c, g, or t
  misc_feature (1332)..(1332): n is a, c, g, or t
  misc_feature (1335)..(1335): n is a, c, g, or t
  misc_feature (1338)..(1338): n is a, c, g, or t
  misc_feature (1341)..(1341): n is a, c, g, or t
  misc_feature (1344)..(1344): n is a, c, g, or t
  misc_feature (1347)..(1347): n is a, c, g, or t
  misc_feature (1350)..(1350): n is a, c, g, or t
  misc_feature (1356)..(1356): n is a, c, g, or t
  misc_feature (1365)..(1365): n is a, c, g, or t
  misc_feature (1374)..(1374): n is a, c, g, or t
  misc_feature (1380)..(1380): n is a, c, g, or t
  misc_feature (1383)..(1383): n is a, c, g, or t
  misc_feature (1386)..(1386): n is a, c, g, or t
  misc_feature (1389)..(1389): n is a, c, g, or t
  misc_feature (1392)..(1392): n is a, c, g, or t
  misc_feature (1395)..(1395): n is a, c, g, or t
  misc_feature (1398)..(1398): n is a, c, g, or t
  misc_feature (1401)..(1401): n is a, c, g, or t
  misc_feature (1407)..(1407): n is a, c, g, or t
  misc_feature (1410)..(1410): n is a, c, g, or t
  misc_feature (1413)..(1413): n is a, c, g, or t
  misc_feature (1416)..(1416): n is a, c, g, or t
  misc_feature (1419)..(1419): n is a, c, g, or t
  misc_feature (1422)..(1422): n is a, c, g, or t
  misc_feature (1425)..(1425): n is a, c, g, or t
  misc_feature (1428)..(1428): n is a, c, g, or t
  misc_feature (1431)..(1431): n is a, c, g, or t
  misc_feature (1434)..(1434): n is a, c, g, or t
  misc_feature (1437)..(1437): n is a, c, g, or t
  misc_feature (1440)..(1440): n is a, c, g, or t
  misc_feature (1443)..(1443): n is a, c, g, or t
  misc_feature (1446)..(1446): n is a, c, g, or t
ggnatgaarggnccnccnggnytncarggngtnaarggncaygcnggnaarmgnggnathytnggngayccnggncaycarggnaarccnggnccnaarggngaygtnggngcnwsnggngarcarggnathccnggnccnccnggnccncarggnathmgnggntayccnggnatggcnggnccnaarggngaracnggnccncayggntayaarggnatggtnggngcnathggngcnacnggnccnccnggngargarggnccnmgnggnccnccnggnmgngcnggngaraarggngaygarggnwsnccnggnathmgnggnccncarggnathacnggnccnaarggngcnacnggnccnccnggnathaayggnaargayggnacnccnggnacnccnggnatgaarggnwsngcnggncargcnggncarccnggnwsnccnggncaycarggnytngcnggngtnccnggncarccnggnacnaarggnggnccnggngaycarggngarccnggnccncarggnytnccnggnttywsnggnccnccnggnaargarggngarccnggnccnmgnggngarathggnccncarggnathatgggncaraarggngaycarggngarmgnggnccngtnggncarccnggnccncarggnmgncarggnccnaarggngarcarggnccnccnggnathccnggnccncarggnytnccnggngtnaarggngayaarggnwsnccnggnaaracnggnccnmgnggnaargtnggngayccnggngtngcnggnytnccnggngaraarggngaraarggngarwsnggngarccnggnccnaarggncarcarggngtnmgnggngarccnggntayccnggnccnwsnggngaygcnggngcnccnggngtncarggntayccnggnccnccnggnccnmgnggnytngcnggnaaymgnggngtnccnggncarccnggnmgncarggngtngarggnmgngaygcnacngaycarcayathgtngaygtngcnytnaaratgytncargarcarytngcngargtngcngtnwsngcnaarmgngargcnytnggngcngtnggnatgatgggnccnccnggnccnccnggnccnccnggntayccnggnaarcarggnccncayggncayccnggnccnmgnggngtnccnggnathgtnggngcngtnggncarathggnaayacnggnccnaarggnaarmgnggngaraarggngayccnggngargtnggnmgnggncayccnggnatgccnggnccnccnggnathccnggnytnccnggnmgnccnggncargcnathaayggnaargayggngaymgnggnwsnccnggngcnccnggngargcnggnmgnccnggnytnccnggnccngtnggnytnccnggnttytgy

SEQ ID NO: 1119 - DNA, 1902 bp, Artificial Sequence
  hCol-CNA24 (alpha3(IX) THD)
  misc_feature (3)..(3): n is a, c, g, or t
  misc_feature (6)..(6): n is a, c, g, or t
  misc_feature (9)..(9): n is a, c, g, or t
  misc_feature (12)..(12): n is a, c, g, or t
  misc_feature (15)..(15): n is a, c, g, or t
  misc_feature (18)..(18): n is a, c, g, or t
  misc_feature (21)..(21): n is a, c, g, or t
  misc_feature (24)..(24): n is a, c, g, or t
  misc_feature (27)..(27): n is a, c, g, or t
  misc_feature (30)..(30): n is a, c, g, or t
  misc_feature (33)..(33): n is a, c, g, or t
  misc_feature (36)..(36): n is a, c, g, or t
  misc_feature (39)..(39): n is a, c, g, or t
  misc_feature (45)..(45): n is a, c, g, or t
  misc_feature (48)..(48): n is a, c, g, or t
  misc_feature (57)..(57): n is a, c, g, or t
  misc_feature (66)..(66): n is a, c, g, or t
  misc_feature (72)..(72): n is a, c, g, or t
  misc_feature (75)..(75): n is a, c, g, or t
  misc_feature (78)..(78): n is a, c, g, or t
  misc_feature (81)..(81): n is a, c, g, or t
  misc_feature (84)..(84): n is a, c, g, or t
  misc_feature (87)..(87): n is a, c, g, or t
  misc_feature (90)..(90): n is a, c, g, or t
  misc_feature (93)..(93): n is a, c, g, or t
  misc_feature (96)..(96): n is a, c, g, or t
  misc_feature (99)..(99): n is a, c, g, or t
  misc_feature (102)..(102): n is a, c, g, or t
  misc_feature (105)..(105): n is a, c, g, or t
  misc_feature (111)..(111): n is a, c, g, or t
  misc_feature (114)..(114): n is a, c, g, or t
  misc_feature (117)..(117): n is a, c, g, or t
  misc_feature (120)..(120): n is a, c, g, or t
  misc_feature (126)..(126): n is a, c, g, or t
  misc_feature (129)..(129): n is a, c, g, or t
  misc_feature (135)..(135): n is a, c, g, or t
  misc_feature (138)..(138): n is a, c, g, or t
  misc_feature (144)..(144): n is a, c, g, or t
  misc_feature (147)..(147): n is a, c, g, or t
  misc_feature (150)..(150): n is a, c, g, or t
  misc_feature (153)..(153): n is a, c, g, or t
  misc_feature (156)..(156): n is a, c, g, or t
  misc_feature (159)..(159): n is a, c, g, or t
  misc_feature (162)..(162): n is a, c, g, or t
  misc_feature (165)..(165): n is a, c, g, or t
  misc_feature (168)..(168): n is a, c, g, or t
  misc_feature (174)..(174): n is a, c, g, or t
  misc_feature (177)..(177): n is a, c, g, or t
  misc_feature (180)..(180): n is a, c, g, or t
  misc_feature (183)..(183): n is a, c, g, or t
  misc_feature (186)..(186): n is a, c, g, or t
  misc_feature (192)..(192): n is a, c, g, or t
  misc_feature (195)..(195): n is a, c, g, or t
  misc_feature (198)..(198): n is a, c, g, or t
  misc_feature (201)..(201): n is a, c, g, or t
  misc_feature (204)..(204): n is a, c, g, or t
  misc_feature (210)..(210): n is a, c, g, or t
  misc_feature (213)..(213): n is a, c, g, or t
  misc_feature (216)..(216): n is a, c, g, or t
  misc_feature (219)..(219): n is a, c, g, or t
  misc_feature (225)..(225): n is a, c, g, or t
  misc_feature (228)..(228): n is a, c, g, or t
  misc_feature (231)..(231): n is a, c, g, or t
  misc_feature (234)..(234): n is a, c, g, or t
  misc_feature (237)..(237): n is a, c, g, or t
  misc_feature (240)..(240): n is a, c, g, or t
  misc_feature (243)..(243): n is a, c, g, or t
  misc_feature (246)..(246): n is a, c, g, or t
  misc_feature (249)..(249): n is a, c, g, or t
  misc_feature (252)..(252): n is a, c, g, or t
  misc_feature (255)..(255): n is a, c, g, or t
  misc_feature (258)..(258): n is a, c, g, or t
  misc_feature (261)..(261): n is a, c, g, or t
  misc_feature (264)..(264): n is a, c, g, or t
  misc_feature (270)..(270): n is a, c, g, or t
  misc_feature (273)..(273): n is a, c, g, or t
  misc_feature (276)..(276): n is a, c, g, or t
  misc_feature (279)..(279): n is a, c, g, or t
  misc_feature (282)..(282): n is a, c, g, or t
  misc_feature (285)..(285): n is a, c, g, or t
  misc_feature (288)..(288): n is a, c, g, or t
  misc_feature (294)..(294): n is a, c, g, or t
  misc_feature (297)..(297): n is a, c, g, or t
  misc_feature (300)..(300): n is a, c, g, or t
  misc_feature (303)..(303): n is a, c, g, or t
  misc_feature (306)..(306): n is a, c, g, or t
  misc_feature (309)..(309): n is a, c, g, or t
  misc_feature (312)..(312): n is a, c, g, or t
  misc_feature (315)..(315): n is a, c, g, or t
  misc_feature (318)..(318): n is a, c, g, or t
  misc_feature (324)..(324): n is a, c, g, or t
  misc_feature (327)..(327): n is a, c, g, or t
  misc_feature (330)..(330): n is a, c, g, or t
  misc_feature (333)..(333): n is a, c, g, or t
  misc_feature (336)..(336): n is a, c, g, or t
  misc_feature (339)..(339): n is a, c, g, or t
  misc_feature (342)..(342): n is a, c, g, or t
  misc_feature (345)..(345): n is a, c, g, or t
  misc_feature (348)..(348): n is a, c, g, or t
  misc_feature (351)..(351): n is a, c, g, or t
  misc_feature (354)..(354): n is a, c, g, or t
  misc_feature (357)..(357): n is a, c, g, or t
  misc_feature (360)..(360): n is a, c, g, or t
  misc_feature (363)..(363): n is a, c, g, or t
  misc_feature (366)..(366): n is a, c, g, or t
  misc_feature (369)..(369): n is a, c, g, or t
  misc_feature (372)..(372): n is a, c, g, or t
  misc_feature (375)..(375): n is a, c, g, or t
  misc_feature (378)..(378): n is a, c, g, or t
  misc_feature (381)..(381): n is a, c, g, or t
  misc_feature (384)..(384): n is a, c, g, or t
  misc_feature (387)..(387): n is a, c, g, or t
  misc_feature (390)..(390): n is a, c, g, or t
  misc_feature (393)..(393): n is a, c, g, or t
  misc_feature (396)..(396): n is a, c, g, or t
  misc_feature (402)..(402): n is a, c, g, or t
  misc_feature (405)..(405): n is a, c, g, or t
  misc_feature (408)..(408): n is a, c, g, or t
  misc_feature (411)..(411): n is a, c, g, or t
  misc_feature (414)..(414): n is a, c, g, or t
  misc_feature (420)..(420): n is a, c, g, or t
  misc_feature (423)..(423): n is a, c, g, or t
  misc_feature (426)..(426): n is a, c, g, or t
  misc_feature (432)..(432): n is a, c, g, or t
  misc_feature (441)..(441): n is a, c, g, or t
  misc_feature (444)..(444): n is a, c, g, or t
  misc_feature (453)..(453): n is a, c, g, or t
  misc_feature (456)..(456): n is a, c, g, or t
  misc_feature (459)..(459): n is a, c, g, or t
  misc_feature (462)..(462): n is a, c, g, or t
  misc_feature (465)..(465): n is a, c, g, or t
  misc_feature (468)..(468): n is a, c, g, or t
  misc_feature (471)..(471): n is a, c, g, or t
  misc_feature (474)..(474): n is a, c, g, or t
  misc_feature (477)..(477): n is a, c, g, or t
  misc_feature (483)..(483): n is a, c, g, or t
  misc_feature (486)..(486): n is a, c, g, or t
  misc_feature (495)..(495): n is a, c, g, or t
  misc_feature (498)..(498): n is a, c, g, or t
  misc_feature (501)..(501): n is a, c, g, or t
  misc_feature (504)..(504): n is a, c, g, or t
  misc_feature (513)..(513): n is a, c, g, or t
  misc_feature (522)..(522): n is a, c, g, or t
  misc_feature (528)..(528): n is a, c, g, or t
  misc_feature (531)..(531): n is a, c, g, or t
  misc_feature (540)..(540): n is a, c, g, or t
  misc_feature (549)..(549): n is a, c, g, or t
  misc_feature (555)..(555): n is a, c, g, or t
  misc_feature (558)..(558): n is a, c, g, or t
  misc_feature (561)..(561): n is a, c, g, or t
  misc_feature (564)..(564): n is a, c, g, or t
  misc_feature (567)..(567): n is a, c, g, or t
  misc_feature (570)..(570): n is a, c, g, or t
  misc_feature (573)..(573): n is a, c, g, or t
  misc_feature (576)..(576): n is a, c, g, or t
  misc_feature (579)..(579): n is a, c, g, or t
  misc_feature (582)..(582): n is a, c, g, or t
  misc_feature (585)..(585): n is a, c, g, or t
  misc_feature (588)..(588): n is a, c, g, or t
  misc_feature (591)..(591): n is a, c, g, or t
  misc_feature (594)..(594): n is a, c, g, or t
  misc_feature (597)..(597): n is a, c, g, or t
  misc_feature (603)..(603): n is a, c, g, or t
  misc_feature (606)..(606): n is a, c, g, or t
  misc_feature (609)..(609): n is a, c, g, or t
  misc_feature (612)..(612): n is a, c, g, or t
  misc_feature (615)..(615): n is a, c, g, or t
  misc_feature (618)..(618): n is a, c, g, or t
  misc_feature (621)..(621): n is a, c, g, or t
  misc_feature (624)..(624): n is a, c, g, or t
  misc_feature (627)..(627): n is a, c, g, or t
  misc_feature (630)..(630): n is a, c, g, or t
  misc_feature (633)..(633): n is a, c, g, or t
  misc_feature (636)..(636): n is a, c, g, or t
  misc_feature (639)..(639): n is a, c, g, or t
  misc_feature (642)..(642): n is a, c, g, or t
  misc_feature (645)..(645): n is a, c, g, or t
  misc_feature (648)..(648): n is a, c, g, or t
  misc_feature (654)..(654): n is a, c, g, or t
  misc_feature (657)..(657): n is a, c, g, or t
  misc_feature (660)..(660): n is a, c, g, or t
  misc_feature (666)..(666): n is a, c, g, or t
  misc_feature (672)..(672): n is a, c, g, or t
  misc_feature (675)..(675): n is a, c, g, or t
  misc_feature (678)..(678): n is a, c, g, or t
  misc_feature (681)..(681): n is a, c, g, or t
  misc_feature (684)..(684): n is a, c, g, or t
  misc_feature (690)..(690): n is a, c, g, or t
  misc_feature (693)..(693): n is a, c, g, or t
  misc_feature (696)..(696): n is a, c, g, or t
  misc_feature (699)..(699): n is a, c, g, or t
  misc_feature (702)..(702): n is a, c, g, or t
  misc_feature (708)..(708): n is a, c, g, or t
  misc_feature (711)..(711): n is a, c, g, or t
  misc_feature (717)..(717): n is a, c, g, or t
  misc_feature (720)..(720): n is a, c, g, or t
  misc_feature (726)..(726): n is a, c, g, or t
  misc_feature (729)..(729): n is a, c, g, or t
  misc_feature (732)..(732): n is a, c, g, or t
  misc_feature (738)..(738): n is a, c, g, or t
  misc_feature (744)..(744): n is a, c, g, or t
  misc_feature (747)..(747): n is a, c, g, or t
  misc_feature (750)..(750): n is a, c, g, or t
  misc_feature (756)..(756): n is a, c, g, or t
  misc_feature (762)..(762): n is a, c, g, or t
  misc_feature (765)..(765): n is a, c, g, or t
  misc_feature (768)..(768): n is a, c, g, or t
  misc_feature (771)..(771): n is a, c, g, or t
  misc_feature (774)..(774): n is a, c, g, or t
  misc_feature (777)..(777): n is a, c, g, or t
  misc_feature (783)..(783): n is a, c, g, or t
  misc_feature (786)..(786): n is a, c, g, or t
  misc_feature (789)..(789): n is a, c, g, or t
  misc_feature (792)..(792): n is a, c, g, or t
  misc_feature (795)..(795): n is a, c, g, or t
  misc_feature (798)..(798): n is a, c, g, or t
  misc_feature (801)..(801): n is a, c, g, or t
  misc_feature (804)..(804): n is a, c, g, or t
  misc_feature (807)..(807): n is a, c, g, or t
  misc_feature (810)..(810): n is a, c, g, or t
  misc_feature (816)..(816): n is a, c, g, or t
  misc_feature (819)..(819): n is a, c, g, or t
  misc_feature (825)..(825): n is a, c, g, or t
  misc_feature (828)..(828): n is a, c, g, or t
  misc_feature (837)..(837): n is a, c, g, or t
  misc_feature (846)..(846): n is a, c, g, or t
  misc_feature (849)..(849): n is a, c, g, or t
  misc_feature (852)..(852): n is a, c, g, or t
  misc_feature (855)..(855): n is a, c, g, or t
  misc_feature (858)..(858): n is a, c, g, or t
  misc_feature (864)..(864): n is a, c, g, or t
  misc_feature (873)..(873): n is a, c, g, or t
  misc_feature (879)..(879): n is a, c, g, or t
  misc_feature (882)..(882): n is a, c, g, or t
  misc_feature (885)..(885): n is a, c, g, or t
  misc_feature (891)..(891): n is a, c, g, or t
  misc_feature (894)..(894): n is a, c, g, or t
  misc_feature (897)..(897): n is a, c, g, or t
  misc_feature (900)..(900): n is a, c, g, or t
  misc_feature (909)..(909): n is a, c, g, or t
  misc_feature (912)..(912): n is a, c, g, or t
  misc_feature (918)..(918): n is a, c, g, or t
  misc_feature (921)..(921): n is a, c, g, or t
  misc_feature (924)..(924): n is a, c, g, or t
  misc_feature (927)..(927): n is a, c, g, or t
  misc_feature (930)..(930): n is a, c, g, or t
  misc_feature (933)..(933): n is a, c, g, or t
  misc_feature (936)..(936): n is a, c, g, or t
  misc_feature (939)..(939): n is a, c, g, or t
  misc_feature (942)..(942): n is a, c, g, or t
  misc_feature (945)..(945): n is a, c, g, or t
  misc_feature (948)..(948): n is a, c, g, or t
  misc_feature (954)..(954): n is a, c, g, or t
  misc_feature (963)..(963): n is a, c, g, or t
  misc_feature (969)..(969): n is a, c, g, or t
  misc_feature (972)..(972): n is a, c, g, or t
  misc_feature (975)..(975): n is a, c, g, or t
  misc_feature (978)..(978): n is a, c, g, or t
  misc_feature (981)..(981): n is a, c, g, or t
  misc_feature (987)..(987): n is a, c, g, or t
  misc_feature (990)..(990): n is a, c, g, or t
  misc_feature (996)..(996): n is a, c, g, or t
  misc_feature (999)..(999): n is a, c, g, or t
  misc_feature (1002)..(1002): n is a, c, g, or t
  misc_feature (1005)..(1005): n is a, c, g, or t
  misc_feature (1008)..(1008): n is a, c, g, or t
  misc_feature (1014)..(1014): n is a, c, g, or t
  misc_feature (1017)..(1017): n is a, c, g, or t
  misc_feature (1020)..(1020): n is a, c, g, or t
  misc_feature (1023)..(1023): n is a, c, g, or t
  misc_feature (1026)..(1026): n is a, c, g, or t
  misc_feature (1032)..(1032): n is a, c, g, or t
  misc_feature (1035)..(1035): n is a, c, g, or t
  misc_feature (1041)..(1041): n is a, c, g, or t
  misc_feature (1044)..(1044): n is a, c, g, or t
  misc_feature (1050)..(1050): n is a, c, g, or t
  misc_feature (1053)..(1053): n is a, c, g, or t
  misc_feature (1059)..(1059): n is a, c, g, or t
  misc_feature (1062)..(1062): n is a, c, g, or t
  misc_feature (1068)..(1068): n is a, c, g, or t
  misc_feature (1071)..(1071): n is a, c, g, or t
  misc_feature (1074)..(1074): n is a, c, g, or t
  misc_feature (1077)..(1077): n is a, c, g, or t
  misc_feature (1080)..(1080): n is a, c, g, or t
  misc_feature (1083)..(1083): n is a, c, g, or t
  misc_feature (1086)..(1086): n is a, c, g, or t
  misc_feature (1089)..(1089): n is a, c, g, or t
  misc_feature (1092)..(1092): n is a, c, g, or t
  misc_feature (1098)..(1098): n is a, c, g, or t
  misc_feature (1101)..(1101): n is a, c, g, or t
  misc_feature (1104)..(1104): n is a, c, g, or t
  misc_feature (1107)..(1107): n is a, c, g, or t
  misc_feature (1110)..(1110): n is a, c, g, or t
  misc_feature (1113)..(1113): n is a, c, g, or t
  misc_feature (1116)..(1116): n is a, c, g, or t
  misc_feature (1119)..(1119): n is a, c, g, or t
  misc_feature (1122)..(1122): n is a, c, g, or t
  misc_feature (1125)..(1125): n is a, c, g, or t
  misc_feature (1134)..(1134): n is a, c, g, or t
  misc_feature (1143)..(1143): n is a, c, g, or t
  misc_feature (1146)..(1146): n is a, c, g, or t
  misc_feature (1152)..(1152): n is a, c, g, or t
  misc_feature (1158)..(1158): n is a, c, g, or t
  misc_feature (1161)..(1161): n is a, c, g, or t
  misc_feature (1164)..(1164): n is a, c, g, or t
  misc_feature (1167)..(1167): n is a, c, g, or t
  misc_feature (1170)..(1170): n is a, c, g, or t
  misc_feature (1173)..(1173): n is a, c, g, or t
  misc_feature (1179)..(1179): n is a, c, g, or t
  misc_feature (1182)..(1182): n is a, c, g, or t
  misc_feature (1185)..(1185): n is a, c, g, or t
  misc_feature (1188)..(1188): n is a, c, g, or t
  misc_feature (1194)..(1194): n is a, c, g, or t
  misc_feature (1197)..(1197): n is a, c, g, or t
  misc_feature (1203)..(1203): n is a, c, g, or t
  misc_feature (1206)..(1206): n is a, c, g, or t
  misc_feature (1209)..(1209): n is a, c, g, or t
  misc_feature (1212)..(1212): n is a, c, g, or t
  misc_feature (1215)..(1215): n is a, c, g, or t
  misc_feature (1218)..(1218): n is a, c, g, or t
  misc_feature (1221)..(1221): n is a, c, g, or t
  misc_feature (1224)..(1224): n is a, c, g, or t
  misc_feature (1227)..(1227): n is a, c, g, or t
  misc_feature (1233)..(1233): n is a, c, g, or t
  misc_feature (1242)..(1242): n is a, c, g, or t
  misc_feature (1248)..(1248): n is a, c, g, or t
  misc_feature (1251)..(1251): n is a, c, g, or t
  misc_feature (1254)..(1254): n is a, c, g, or t
  misc_feature (1260)..(1260): n is a, c, g, or t
  misc_feature (1263)..(1263): n is a, c, g, or t
  misc_feature (1266)..(1266): n is a, c, g, or t
  misc_feature (1269)..(1269): n is a, c, g, or t
  misc_feature (1278)..(1278): n is a, c, g, or t
  misc_feature (1284)..(1284): n is a, c, g, or t
  misc_feature (1287)..(1287): n is a, c, g, or t
  misc_feature (1290)..(1290): n is a, c, g, or t
  misc_feature (1293)..(1293): n is a, c, g, or t
  misc_feature (1296)..(1296): n is a, c, g, or t
  misc_feature (1299)..(1299): n is a, c, g, or t
  misc_feature (1302)..(1302): n is a, c, g, or t
  misc_feature (1305)..(1305): n is a, c, g, or t
  misc_feature (1308)..(1308): n is a, c, g, or t
  misc_feature (1314)..(1314): n is a, c, g, or t
  misc_feature (1320)..(1320): n is a, c, g, or t
  misc_feature (1323)..(1323): n is a, c, g, or t
  misc_feature (1326)..(1326): n is a, c, g, or t
  misc_feature (1329)..(1329): n is a, c, g, or t
  misc_feature (1332)..(1332): n is a, c, g, or t
  misc_feature (1338)..(1338): n is a, c, g, or t
  misc_feature (1341)..(1341): n is a, c, g, or t
  misc_feature (1344)..(1344): n is a, c, g, or t
  misc_feature (1350)..(1350): n is a, c, g, or t
  misc_feature (1353)..(1353): n is a, c, g, or t
  misc_feature (1359)..(1359): n is a, c, g, or t
  misc_feature (1362)..(1362): n is a, c, g, or t
  misc_feature (1368)..(1368): n is a, c, g, or t
  misc_feature (1371)..(1371): n is a, c, g, or t
  misc_feature (1374)..(1374): n is a, c, g, or t
  misc_feature (1377)..(1377): n is a, c, g, or t
  misc_feature (1380)..(1380): n is a, c, g, or t
  misc_feature (1386)..(1386): n is a, c, g, or t
  misc_feature (1389)..(1389): n is a, c, g, or t
  misc_feature (1392)..(1392): n is a, c, g, or t
  misc_feature (1395)..(1395): n is a, c, g, or t
  misc_feature (1398)..(1398): n is a, c, g, or t
  misc_feature (1401)..(1401): n is a, c, g, or t
  misc_feature (1404)..(1404): n is a, c, g, or t
  misc_feature (1407)..(1407): n is a, c, g, or t
  misc_feature (1410)..(1410): n is a, c, g, or t
  misc_feature (1413)..(1413): n is a, c, g, or t
  misc_feature (1416)..(1416): n is a, c, g, or t
  misc_feature (1422)..(1422): n is a, c, g, or t
  misc_feature (1425)..(1425): n is a, c, g, or t
  misc_feature (1428)..(1428): n is a, c, g, or t
  misc_feature (1431)..(1431): n is a, c, g, or t
  misc_feature (1434)..(1434): n is a, c, g, or t
  misc_feature (1437)..(1437): n is a, c, g, or t
  misc_feature (1440)..(1440): n is a, c, g, or t
  misc_feature (1446)..(1446): n is a, c, g, or t
  misc_feature (1449)..(1449): n is a, c, g, or t
  misc_feature (1455)..(1455): n is a, c, g, or t
  misc_feature (1458)..(1458): n is a, c, g, or t
  misc_feature (1461)..(1461): n is a, c, g, or t
  misc_feature (1464)..(1464): n is a, c, g, or t
  misc_feature (1467)..(1467): n is a, c, g, or t
  misc_feature (1476)..(1476): n is a, c, g, or t
  misc_feature (1479)..(1479): n is a, c, g, or t
  misc_feature (1488)..(1488): n is a, c, g, or t
  misc_feature (1494)..(1494): n is a, c, g, or t
  misc_feature (1500)..(1500): n is a, c, g, or t
  misc_feature (1506)..(1506): n is a, c, g, or t
  misc_feature (1509)..(1509): n is a, c, g, or t
  misc_feature (1518)..(1518): n is a, c, g, or t
  misc_feature (1530)..(1530): n is a, c, g, or t
  misc_feature (1536)..(1536): n is a, c, g, or t
  misc_feature (1539)..(1539): n is a, c, g, or t
  misc_feature (1542)..(1542): n is a, c, g, or t
  misc_feature (1548)..(1548): n is a, c, g, or t
  misc_feature (1551)..(1551): n is a, c, g, or t
  misc_feature (1557)..(1557): n is a, c, g, or t
  misc_feature (1560)..(1560): n is a, c, g, or t
  misc_feature (1563)..(1563): n is a, c, g, or t
  misc_feature (1566)..(1566): n is a, c, g, or t
  misc_feature (1569)..(1569): n is a, c, g, or t
  misc_feature (1572)..(1572): n is a, c, g, or t
  misc_feature (1578)..(1578): n is a, c, g, or t
  misc_feature (1581)..(1581): n is a, c, g, or t
  misc_feature (1584)..(1584): n is a, c, g, or t
  misc_feature (1587)..(1587): n is a, c, g, or t
  misc_feature (1590)..(1590): n is a, c, g, or t
  misc_feature (1593)..(1593): n is a, c, g, or t
  misc_feature (1596)..(1596): n is a, c, g, or t
  misc_feature (1599)..(1599): n is a, c, g, or t
  misc_feature (1602)..(1602): n is a, c, g, or t
  misc_feature (1605)..(1605): n is a, c, g, or t
  misc_feature (1608)..(1608): n is a, c, g, or t
  misc_feature (1611)..(1611): n is a, c, g, or t
  misc_feature (1614)..(1614): n is a, c, g, or t
  misc_feature (1617)..(1617): n is a, c, g, or t
  misc_feature (1620)..(1620): n is a, c, g, or t
  misc_feature (1623)..(1623): n is a, c, g, or t
  misc_feature (1626)..(1626): n is a, c, g, or t
  misc_feature (1632)..(1632): n is a, c, g, or t
  misc_feature (1638)..(1638): n is a, c, g, or t
  misc_feature (1641)..(1641): n is a, c, g, or t
  misc_feature (1644)..(1644): n is a, c, g, or t
  misc_feature (1647)..(1647): n is a, c, g, or t
  misc_feature (1650)..(1650): n is a, c, g, or t
  misc_feature (1653)..(1653): n is a, c, g, or t
  misc_feature (1656)..(1656): n is a, c, g, or t
  misc_feature (1659)..(1659): n is a, c, g, or t
  misc_feature (1665)..(1665): n is a, c, g, or t
  misc_feature (1668)..(1668): n is a, c, g, or t
  misc_feature (1671)..(1671): n is a, c, g, or t
  misc_feature (1674)..(1674): n is a, c, g, or t
  misc_feature (1677)..(1677): n is a, c, g, or t
  misc_feature (1683)..(1683): n is a, c, g, or t
  misc_feature (1686)..(1686): n is a, c, g, or t
  misc_feature (1692)..(1692): n is a, c, g, or t
  misc_feature (1695)..(1695): n is a, c, g, or t
  misc_feature (1698)..(1698): n is a, c, g, or t
  misc_feature (1701)..(1701): n is a, c, g, or t
  misc_feature (1704)..(1704): n is a, c, g, or t
  misc_feature (1713)..(1713): n is a, c, g, or t
  misc_feature (1719)..(1719): n is a, c, g, or t
  misc_feature (1722)..(1722): n is a, c, g, or t
  misc_feature (1731)..(1731): n is a, c, g, or t
  misc_feature (1734)..(1734): n is a, c, g, or t
  misc_feature (1737)..(1737): n is a, c, g, or t
  misc_feature (1740)..(1740): n is a, c, g, or t
  misc_feature (1743)..(1743): n is a, c, g, or t
  misc_feature (1746)..(1746): n is a, c, g, or t
  misc_feature (1749)..(1749): n is a, c, g, or t
  misc_feature (1755)..(1755): n is a, c, g, or t
  misc_feature (1758)..(1758): n is a, c, g, or t
  misc_feature (1764)..(1764): n is a, c, g, or t
  misc_feature (1773)..(1773): n is a, c, g, or t
  misc_feature (1776)..(1776): n is a, c, g, or t
  misc_feature (1782)..(1782): n is a, c, g, or t
  misc_feature (1785)..(1785): n is a, c, g, or t
  misc_feature (1791)..(1791): n is a, c, g, or t
  misc_feature (1794)..(1794): n is a, c, g, or t
  misc_feature (1797)..(1797): n is a, c, g, or t
  misc_feature (1800)..(1800): n is a, c, g, or t
  misc_feature (1803)..(1803): n is a, c, g, or t
  misc_feature (1806)..(1806): n is a, c, g, or t
  misc_feature (1815)..(1815): n is a, c, g, or t
  misc_feature (1824)..(1824): n is a, c, g, or t
  misc_feature (1827)..(1827): n is a, c, g, or t
  misc_feature (1830)..(1830): n is a, c, g, or t
  misc_feature (1833)..(1833): n is a, c, g, or t
  misc_feature (1839)..(1839): n is a, c, g, or t
  misc_feature (1842)..(1842): n is a, c, g, or t
  misc_feature (1845)..(1845): n is a, c, g, or t
  misc_feature (1848)..(1848): n is a, c, g, or t
  misc_feature (1851)..(1851): n is a, c, g, or t
  misc_feature (1857)..(1857): n is a, c, g, or t
  misc_feature (1860)..(1860): n is a, c, g, or t
  misc_feature (1863)..(1863): n is a, c, g, or t
  misc_feature (1866)..(1866): n is a, c, g, or t
  misc_feature (1869)..(1869): n is a, c, g, or t
  misc_feature (1872)..(1872): n is a, c, g, or t
  misc_feature (1878)..(1878): n is a, c, g, or t
  misc_feature (1881)..(1881): n is a, c, g, or t
  misc_feature (1887)..(1887): n is a, c, g, or t
  misc_feature (1890)..(1890): n is a, c, g, or t
  misc_feature (1893)..(1893): n is a, c, g, or t
  misc_feature (1896)..(1896): n is a, c, g, or t
ggnytnccnggnccnccnggnccnccnggnccnccnggnaarccnggncargayggnathgayggngargcnggnccnccnggnytnccnggnccnccnggnccnaarggngcnccnggnaarccnggnaarccnggngargcnggnytnccnggnytnccnggngtngayggnytnacnggnmgngayggnccnccnggnccnaarggngcnccnggngarmgnggnwsnytnggnccnccnggnccnccnggnytnggnggnaarggnytnccnggnccnccnggngargcnggngtnwsnggnccnccnggnggnathggnytnmgnggnccnccnggnccnwsnggnytnccnggnytnccnggnccnccnggnccnccnggnccnccnggncayccnggngtnytnccngarggngcnacngayytncartgyccnwsnathtgyccnccnggnccnccnggnccnccnggnatgccnggnttyaarggnccnacnggntayaarggngarcarggngargtnggnaargayggngaraarggngayccnggnccnccnggnccngcnggnytnccnggnwsngtnggnytncarggnccnmgnggnytnmgnggnytnccnggnccnytnggnccnccnggngaymgnggnccnathggnttymgnggnccnccnggnathccnggngcnccnggnaargcnggngaymgnggngarmgnggnccngarggnttymgnggnccnaarggngayytnggnmgnccnggnccnaarggnacnccnggngtngcnggnccnwsnggngarccnggnatgccnggnaargayggncaraayggngtnccnggnytngayggncaraarggngargcnggnmgnaayggngcnccnggngaraarggnccnaayggnytnccnggnytnccnggnmgngcnggnwsnaarggngaraarggngarmgnggnmgngcnggngarytnggngargcnggnccnwsnggngarccnggngtnccnggngaygcnggnatgccnggngarmgnggngargcnggncaymgnggnwsngcnggngcnytnggnccncarggnccnccnggngcnccnggngtnmgnggnttycarggncaraarggnwsnatgggngayccnggnytnccnggnccncarggnytnmgnggngaygtnggngaymgnggnccnggnggngcngcnggnccnaarggngaycarggnathgcnggnwsngayggnytnccnggngayaarggngarytnggnccnwsnggnytngtnggnccnaarggngarwsnggnwsnmgnggngarytnggnccnaarggnacncarggnccnaayggnacnwsnggngtncarggngtnccnggnccnccnggnccnytnggnytncarggngtnccnggngtnccnggnathacnggnaarccnggngtnccnggnaargargcnwsngarcarmgnathmgngarytntgyggnggnatgathwsngarcarathgcncarytngcngcncayytnmgnaarccnytngcnccnggnwsnathggnmgnccnggnccngcnggnccnccnggnccnccnggnccnccnggnwsnathggncayccnggngcnmgnggnccnccnggntaymgnggnccnacnggngarytnggngayccnggnccnmgnggnaaycarggngaymgnggngayaarggngcngcnggngcnggnytngayggnccngarggngaycarggnccncarggnccncarggngtnccnggnacnwsnaargayggncargayggngcnccnggngarccnggnccnccnggngayccnggnytnccnggngcnathggngcncarggnacnccnggnathtgy

SEQ ID NO: 1120 - DNA, 1389 bp, Artificial Sequence
  hCol-CNA25 (alpha1(X) THD)
  misc_feature (3)..(3): n is a, c, g, or t
  misc_feature (12)..(12): n is a, c, g, or t
  misc_feature (15)..(15): n is a, c, g, or t
  misc_feature (18)..(18): n is a, c, g, or t
  misc_feature (21)..(21): n is a, c, g, or t
  misc_feature (24)..(24): n is a, c, g, or t
  misc_feature (27)..(27): n is a, c, g, or t
  misc_feature (30)..(30): n is a, c, g, or t
  misc_feature (33)..(33): n is a, c, g, or t
  misc_feature (36)..(36): n is a, c, g, or t
  misc_feature (39)..(39): n is a, c, g, or t
  misc_feature (42)..(42): n is a, c, g, or t
  misc_feature (45)..(45): n is a, c, g, or t
  misc_feature (48)..(48): n is a, c, g, or t
  misc_feature (54)..(54): n is a, c, g, or t
  misc_feature (57)..(57): n is a, c, g, or t
  misc_feature (60)..(60): n is a, c, g, or t
  misc_feature (63)..(63): n is a, c, g, or t
  misc_feature (66)..(66): n is a, c, g, or t
  misc_feature (69)..(69): n is a, c, g, or t
  misc_feature (72)..(72): n is a, c, g, or t
  misc_feature (75)..(75): n is a, c, g, or t
  misc_feature (81)..(81): n is a, c, g, or t
  misc_feature (84)..(84): n is a, c, g, or t
  misc_feature (90)..(90): n is a, c, g, or t
  misc_feature (93)..(93): n is a, c, g, or t
  misc_feature (96)..(96): n is a, c, g, or t
  misc_feature (99)..(99): n is a, c, g, or t
  misc_feature (102)..(102): n is a, c, g, or t
  misc_feature (108)..(108): n is a, c, g, or t
  misc_feature (114)..(114): n is a, c, g, or t
  misc_feature (117)..(117): n is a, c, g, or t
  misc_feature (120)..(120): n is a, c, g, or t
  misc_feature (123)..(123): n is a, c, g, or t
  misc_feature (126)..(126): n is a, c, g, or t
  misc_feature (129)..(129): n is a, c, g, or t
  misc_feature (132)..(132): n is a, c, g, or t
  misc_feature (135)..(135): n is a, c, g, or t
  misc_feature (138)..(138): n is a, c, g, or t
  misc_feature (141)..(141): n is a, c, g, or t
  misc_feature (144)..(144): n is a, c, g, or t
  misc_feature (147)..(147): n is a, c, g, or t
  misc_feature (150)..(150): n is a, c, g, or t
  misc_feature (156)..(156): n is a, c, g, or t
  misc_feature (159)..(159): n is a, c, g, or t
  misc_feature (162)..(162): n is a, c, g, or t
  misc_feature (165)..(165): n is a, c, g, or t
  misc_feature (168)..(168): n is a, c, g, or t
  misc_feature (171)..(171): n is a, c, g, or t
  misc_feature (174)..(174): n is a, c, g, or t
  misc_feature (177)..(177): n is a, c, g, or t
  misc_feature (183)..(183): n is a, c, g, or t
  misc_feature (186)..(186): n is a, c, g, or t
  misc_feature (192)..(192): n is a, c, g, or t
  misc_feature (195)..(195): n is a, c, g, or t
  misc_feature (198)..(198): n is a, c, g, or t
  misc_feature (204)..(204): n is a, c, g, or t
  misc_feature (207)..(207): n is a, c, g, or t
  misc_feature (213)..(213): n is a, c, g, or t
  misc_feature (219)..(219): n is a, c, g, or t
  misc_feature (222)..(222): n is a, c, g, or t
  misc_feature (225)..(225): n is a, c, g, or t
  misc_feature (228)..(228): n is a, c, g, or t
  misc_feature (231)..(231): n is a, c, g, or t
  misc_feature (234)..(234): n is a, c, g, or t
  misc_feature (237)..(237): n is a, c, g, or t
  misc_feature (240)..(240): n is a, c, g, or t
  misc_feature (243)..(243): n is a, c, g, or t
  misc_feature (246)..(246): n is a, c, g, or t
  misc_feature (249)..(249): n is a, c, g, or t
  misc_feature (252)..(252): n is a, c, g, or t
  misc_feature (255)..(255): n is a, c, g, or t
  misc_feature (258)..(258): n is a, c, g, or t
  misc_feature (261)..(261): n is a, c, g, or t
  misc_feature (264)..(264): n is a, c, g, or t
  misc_feature (267)..(267): n is a, c, g, or t
  misc_feature (273)..(273): n is a, c, g, or t
  misc_feature (276)..(276): n is a, c, g, or t
  misc_feature (279)..(279): n is a, c, g, or t
  misc_feature (282)..(282): n is a, c, g, or t
  misc_feature (285)..(285): n is a, c, g, or t
  misc_feature (291)..(291): n is a, c, g, or t
  misc_feature (294)..(294): n is a, c, g, or t
  misc_feature (297)..(297): n is a, c, g, or t
  misc_feature (300)..(300): n is a, c, g, or t
  misc_feature (306)..(306): n is a, c, g, or t
  misc_feature (309)..(309): n is a, c, g, or t
  misc_feature (318)..(318): n is a, c, g, or t
  misc_feature (321)..(321): n is a, c, g, or t
  misc_feature (324)..(324): n is a, c, g, or t
  misc_feature (327)..(327): n is a, c, g, or t
  misc_feature (330)..(330): n is a, c, g, or t
  misc_feature (333)..(333): n is a, c, g, or t
  misc_feature (336)..(336): n is a, c, g, or t
  misc_feature (339)..(339): n is a, c, g, or t
  misc_feature (342)..(342): n is a, c, g, or t
  misc_feature (345)..(345): n is a, c, g, or t
  misc_feature (351)..(351): n is a, c, g, or t
  misc_feature (354)..(354): n is a, c, g, or t
  misc_feature (363)..(363): n is a, c, g, or t
  misc_feature (366)..(366): n is a, c, g, or t
  misc_feature (369)..(369): n is a, c, g, or t
  misc_feature (372)..(372): n is a, c, g, or t
  misc_feature (375)..(375): n is a, c, g, or t
  misc_feature (378)..(378): n is a, c, g, or t
  misc_feature (381)..(381): n is a, c, g, or t
  misc_feature (390)..(390): n is a, c, g, or t
  misc_feature (399)..(399): n is a, c, g, or t
  misc_feature (408)..(408): n is a, c, g, or t
  misc_feature (414)..(414): n is a, c, g, or t
  misc_feature (417)..(417): n is a, c, g, or t
  misc_feature (420)..(420): n is a, c, g, or t
  misc_feature (423)..(423): n is a, c, g, or t
  misc_feature (426)..(426): n is a, c, g, or t
  misc_feature (429)..(429): n is a, c, g, or t
  misc_feature (432)..(432): n is a, c, g, or t
  misc_feature (438)..(438): n is a, c, g, or t
  misc_feature (441)..(441): n is a, c, g, or t
  misc_feature (444)..(444): n is a, c, g, or t
  misc_feature (447)..(447): n is a, c, g, or t
  misc_feature (450)..(450): n is a, c, g, or t
  misc_feature (453)..(453): n is a, c, g, or t
  misc_feature (459)..(459): n is a, c, g, or t
  misc_feature (462)..(462): n is a, c, g, or t
  misc_feature (465)..(465): n is a, c, g, or t
  misc_feature (468)..(468): n is a, c, g, or t
  misc_feature (471)..(471): n is a, c, g, or t
  misc_feature (474)..(474): n is a, c, g, or t
  misc_feature (477)..(477): n is a, c, g, or t
  misc_feature (480)..(480): n is a, c, g, or t
  misc_feature (483)..(483): n is a, c, g, or t
  misc_feature (486)..(486): n is a, c, g, or t
  misc_feature (489)..(489): n is a, c, g, or t
  misc_feature (492)..(492): n is a, c, g, or t
  misc_feature (498)..(498): n is a, c, g, or t
  misc_feature (501)..(501): n is a, c, g, or t
  misc_feature (510)..(510): n is a, c, g, or t
  misc_feature (513)..(513): n is a, c, g, or t
  misc_feature (516)..(516): n is a, c, g, or t
  misc_feature (519)..(519): n is a, c, g, or t
  misc_feature (525)..(525): n is a, c, g, or t
  misc_feature (528)..(528): n is a, c, g, or t
  misc_feature (537)..(537): n is a, c, g, or t
  misc_feature (543)..(543): n is a, c, g, or t
  misc_feature (546)..(546): n is a, c, g, or t
  misc_feature (552)..(552): n is a, c, g, or t
  misc_feature (555)..(555): n is a, c, g, or t
  misc_feature (564)..(564): n is a, c, g, or t
  misc_feature (567)..(567): n is a, c, g, or t
  misc_feature (573)..(573): n is a, c, g, or t
  misc_feature (576)..(576): n is a, c, g, or t
  misc_feature (579)..(579): n is a, c, g, or t
  misc_feature (582)..(582): n is a, c, g, or t
  misc_feature (585)..(585): n is a, c, g, or t
  misc_feature (591)..(591): n is a, c, g, or t
  misc_feature (594)..(594): n is a, c, g, or t
  misc_feature (597)..(597): n is a, c, g, or t
  misc_feature (600)..(600): n is a, c, g, or t
  misc_feature (606)..(606): n is a, c, g, or t
  misc_feature (609)..(609): n is a, c, g, or t
  misc_feature (612)..(612): n is a, c, g, or t
  misc_feature (618)..(618): n is a, c, g, or t
  misc_feature (624)..(624): n is a, c, g, or t
  misc_feature (630)..(630): n is a, c, g, or t
  misc_feature (633)..(633): n is a, c, g, or t
  misc_feature (636)..(636): n is a, c, g, or t
  misc_feature (639)..(639): n is a, c, g, or t
  misc_feature (642)..(642): n is a, c, g, or t
  misc_feature (645)..(645): n is a, c, g, or t
  misc_feature (648)..(648): n is a, c, g, or t
  misc_feature (651)..(651): n is a, c, g, or t
  misc_feature (657)..(657): n is a, c, g, or t
  misc_feature (660)..(660): n is a, c, g, or t
  misc_feature (666)..(666): n is a, c, g, or t
  misc_feature (669)..(669): n is a, c, g, or t
  misc_feature (672)..(672): n is a, c, g, or t
  misc_feature (678)..(678): n is a, c, g, or t
  misc_feature (681)..(681): n is a, c, g, or t
  misc_feature (684)..(684): n is a, c, g, or t
  misc_feature (687)..(687): n is a, c, g, or t
  misc_feature (690)..(690): n is a, c, g, or t
  misc_feature (693)..(693): n is a, c, g, or t
  misc_feature (696)..(696): n is a, c, g, or t
  misc_feature (702)..(702): n is a, c, g, or t
  misc_feature (705)..(705): n is a, c, g, or t
  misc_feature (708)..(708): n is a, c, g, or t
  misc_feature (711)..(711): n is a, c, g, or t
  misc_feature (714)..(714): n is a, c, g, or t
  misc_feature (717)..(717): n is a, c, g, or t
  misc_feature (720)..(720): n is a, c, g, or t
  misc_feature (723)..(723): n is a, c, g, or t
  misc_feature (729)..(729): n is a, c, g, or t
  misc_feature (735)..(735): n is a, c, g, or t
  misc_feature (738)..(738): n is a, c, g, or t
  misc_feature (741)..(741): n is a, c, g, or t
  misc_feature (744)..(744): n is a, c, g, or t
  misc_feature (747)..(747): n is a, c, g, or t
  misc_feature (750)..(750): n is a, c, g, or t
  misc_feature (756)..(756): n is a, c, g, or t
  misc_feature (762)..(762): n is a, c, g, or t
  misc_feature (765)..(765): n is a, c, g, or t
  misc_feature (768)..(768): n is a, c, g, or t
  misc_feature (771)..(771): n is a, c, g, or t
  misc_feature (774)..(774): n is a, c, g, or t
  misc_feature (777)..(777): n is a, c, g, or t
  misc_feature (780)..(780): n is a, c, g, or t
  misc_feature (783)..(783): n is a, c, g, or t
  misc_feature (786)..(786): n is a, c, g, or t
  misc_feature (789)..(789): n is a, c, g, or t
  misc_feature (792)..(792): n is a, c, g, or t
  misc_feature (795)..(795): n is a, c, g, or t
  misc_feature (801)..(801): n is a, c, g, or t
  misc_feature (810)..(810): n is a, c, g, or t
  misc_feature (813)..(813): n is a, c, g, or t
  misc_feature (816)..(816): n is a, c, g, or t
  misc_feature (819)..(819): n is a, c, g, or t
  misc_feature (822)..(822): n is a, c, g, or t
  misc_feature (825)..(825): n is a, c, g, or t
  misc_feature (828)..(828): n is a, c, g, or t
  misc_feature (834)..(834): n is a, c, g, or t
  misc_feature (837)..(837): n is a, c, g, or t
  misc_feature (840)..(840): n is a, c, g, or t
  misc_feature (843)..(843): n is a, c, g, or t
  misc_feature (846)..(846): n is a, c, g, or t
  misc_feature (849)..(849): n is a, c, g, or t
  misc_feature (852)..(852): n is a, c, g, or t
  misc_feature (855)..(855): n is a, c, g, or t
  misc_feature (864)..(864): n is a, c, g, or t
  misc_feature (867)..(867): n is a, c, g, or t
  misc_feature (873)..(873): n is a, c, g, or t
  misc_feature (876)..(876): n is a, c, g, or t
  misc_feature (882)..(882): n is a, c, g, or t
  misc_feature (888)..(888): n is a, c, g, or t
  misc_feature (891)..(891): n is a, c, g, or t
  misc_feature (894)..(894): n is a, c, g, or t
  misc_feature (900)..(900): n is a, c, g, or t
  misc_feature (903)..(903): n is a, c, g, or t
  misc_feature (906)..(906): n is a, c, g, or t
  misc_feature (909)..(909): n is a, c, g, or t
  misc_feature (912)..(912): n is a, c, g, or t
  misc_feature (918)..(918): n is a, c, g, or t
  misc_feature (924)..(924): n is a, c, g, or t
  misc_feature (927)..(927): n is a, c, g, or t
  misc_feature (930)..(930): n is a, c, g, or t
  misc_feature (933)..(933): n is a, c, g, or t
  misc_feature (936)..(936): n is a, c, g, or t
  misc_feature (939)..(939): n is a, c, g, or t
  misc_feature (942)..(942): n is a, c, g, or t
  misc_feature (945)..(945): n is a, c, g, or t
  misc_feature (951)..(951): n is a, c, g, or t
  misc_feature (954)..(954): n is a, c, g, or t
  misc_feature (957)..(957): n is a, c, g, or t
  misc_feature (963)..(963): n is a, c, g, or t
  misc_feature (969)..(969): n is a, c, g, or t
  misc_feature (972)..(972): n is a, c, g, or t
  misc_feature (975)..(975): n is a, c, g, or t
  misc_feature (978)..(978): n is a, c, g, or t
  misc_feature (981)..(981): n is a, c, g, or t
  misc_feature (984)..(984): n is a, c, g, or t
  misc_feature (990)..(990): n is a, c, g, or t
  misc_feature (996)..(996): n is a, c, g, or t
  misc_feature (999)..(999): n is a, c, g, or t
  misc_feature (1005)..(1005): n is a, c, g, or t
  misc_feature (1008)..(1008): n is a, c, g, or t
  misc_feature (1014)..(1014): n is a, c, g, or t
  misc_feature (1017)..(1017): n is a, c, g, or t
  misc_feature (1020)..(1020): n is a, c, g, or t
  misc_feature (1026)..(1026): n is a, c, g, or t
  misc_feature (1029)..(1029): n is a, c, g, or t
  misc_feature (1035)..(1035): n is a, c, g, or t
  misc_feature (1041)..(1041): n is a, c, g, or t
  misc_feature (1044)..(1044): n is a, c, g, or t
  misc_feature (1047)..(1047): n is a, c, g, or t
  misc_feature (1050)..(1050): n is a, c, g, or t
  misc_feature (1053)..(1053): n is a, c, g, or t
  misc_feature (1056)..(1056): n is a, c, g, or t
  misc_feature (1062)..(1062): n is a, c, g, or t
  misc_feature (1068)..(1068): n is a, c, g, or t
  misc_feature (1071)..(1071): n is a, c, g, or t
  misc_feature (1074)..(1074): n is a, c, g, or t
  misc_feature (1077)..(1077): n is a, c, g, or t
  misc_feature (1080)..(1080): n is a, c, g, or t
  misc_feature (1083)..(1083): n is a, c, g, or t
  misc_feature (1086)..(1086): n is a, c, g, or t
  misc_feature (1089)..(1089): n is a, c, g, or t
  misc_feature (1092)..(1092): n is a, c, g, or t
  misc_feature (1095)..(1095): n is a, c, g, or t
  misc_feature (1098)..(1098): n is a, c, g, or t
  misc_feature (1101)..(1101): n is a, c, g, or t
  misc_feature (1104)..(1104): n is a, c, g, or t
  misc_feature (1107)..(1107): n is a, c, g, or t
  misc_feature (1110)..(1110): n is a, c, g, or t
  misc_feature (1113)..(1113): n is a, c, g, or t
  misc_feature (1116)..(1116): n is a, c, g, or t
  misc_feature (1119)..(1119): n is a, c, g, or t
  misc_feature (1125)..(1125): n is a, c, g, or t
  misc_feature (1131)..(1131): n is a, c, g, or t
  misc_feature (1134)..(1134): n is a, c, g, or t
  misc_feature (1143)..(1143): n is a, c, g, or t
  misc_feature (1149)..(1149): n is a, c, g, or t
  misc_feature (1152)..(1152): n is a, c, g, or t
  misc_feature (1155)..(1155): n is a, c, g, or t
  misc_feature (1158)..(1158): n is a, c, g, or t
  misc_feature (1161)..(1161): n is a, c, g, or t
  misc_feature (1164)..(1164): n is a, c, g, or t
  misc_feature (1167)..(1167): n is a, c, g, or t
  misc_feature (1170)..(1170): n is a, c, g, or t
  misc_feature (1176)..(1176): n is a, c, g, or t
  misc_feature (1179)..(1179): n is a, c, g, or t
  misc_feature (1182)..(1182): n is a, c, g, or t
  misc_feature (1185)..(1185): n is a, c, g, or t
  misc_feature (1188)..(1188): n is a, c, g, or t
  misc_feature (1191)..(1191): n is a, c, g, or t
  misc_feature (1197)..(1197): n is a, c, g, or t
  misc_feature (1200)..(1200): n is a, c, g, or t
  misc_feature (1203)..(1203): n is a, c, g, or t
  misc_feature (1206)..(1206): n is a, c, g, or t
  misc_feature (1212)..(1212): n is a, c, g, or t
  misc_feature (1215)..(1215): n is a, c, g, or t
  misc_feature (1221)..(1221): n is a, c, g, or t
  misc_feature (1224)..(1224): n is a, c, g, or t
  misc_feature (1227)..(1227): n is a, c, g, or t
  misc_feature (1233)..(1233): n is a, c, g, or t
  misc_feature (1239)..(1239): n is a, c, g, or t
  misc_feature (1242)..(1242): n is a, c, g, or t
  misc_feature (1245)..(1245): n is a, c, g, or t
  misc_feature (1248)..(1248): n is a, c, g, or t
  misc_feature (1251)..(1251): n is a, c, g, or t
  misc_feature (1254)..(1254): n is a, c, g, or t
  misc_feature (1257)..(1257): n is a, c, g, or t
  misc_feature (1260)..(1260): n is a, c, g, or t
  misc_feature (1263)..(1263): n is a, c, g, or t
  misc_feature (1266)..(1266): n is a, c, g, or t
  misc_feature (1269)..(1269): n is a, c, g, or t
  misc_feature (1275)..(1275): n is a, c, g, or t
  misc_feature (1278)..(1278): n is a, c, g, or t
  misc_feature (1284)..(1284): n is a, c, g, or t
  misc_feature (1287)..(1287): n is a, c, g, or t
  misc_feature (1293)..(1293): n is a, c, g, or t
  misc_feature (1296)..(1296): n is a, c, g, or t
  misc_feature (1299)..(1299): n is a, c, g, or t
  misc_feature (1302)..(1302): n is a, c, g, or t
  misc_feature (1305)..(1305): n is a, c, g, or t
  misc_feature (1308)..(1308): n is a, c, g, or t
  misc_feature (1311)..(1311): n is a, c, g, or t
  misc_feature (1314)..(1314): n is a, c, g, or t
  misc_feature (1317)..(1317): n is a, c, g, or t
  misc_feature (1320)..(1320): n is a, c, g, or t
  misc_feature (1323)..(1323): n is a, c, g, or t
  misc_feature (1326)..(1326): n is a, c, g, or t
  misc_feature (1329)..(1329): n is a, c, g, or t
  misc_feature (1335)..(1335): n is a, c, g, or t
  misc_feature (1338)..(1338): n is a, c, g, or t
  misc_feature (1344)..(1344): n is a, c, g, or t
  misc_feature (1347)..(1347): n is a, c, g, or t
  misc_feature (1350)..(1350): n is a, c, g, or t
  misc_feature (1353)..(1353): n is a, c, g, or t
  misc_feature (1356)..(1356): n is a, c, g, or t
  misc_feature (1359)..(1359): n is a, c, g, or t
  misc_feature (1362)..(1362): n is a, c, g, or t
  misc_feature (1365)..(1365): n is a, c, g, or t
  misc_feature (1368)..(1368): n is a, c, g, or t
  misc_feature (1371)..(1371): n is a, c, g, or t
  misc_feature (1374)..(1374): n is a, c, g, or t
  misc_feature (1377)..(1377): n is a, c, g, or t
  misc_feature (1380)..(1380): n is a, c, g, or t
  misc_feature (1383)..(1383): n is a, c, g, or t
  misc_feature (1389)..(1389): n is a, c, g, or t
ggngarcarggnacnccnggnccnccnggnccngcnggnccnmgnggncayccnggnccnwsnggnccnccnggnaarccnggntayggnwsnccnggnytncarggngarccnggnytnccnggnccnccnggnccnwsngcngtnggnaarccnggngtnccnggnytnccnggnaarccnggngarmgnggnccntayggnccnaarggngaygtnggnccngcnggnytnccnggnccnmgnggnccnccnggnccnccnggnathccnggnccngcnggnathwsngtnccnggnaarccnggncarcarggnccnacnggngcnccnggnccnmgnggnttyccnggngaraarggngcnccnggngtnccnggnatgaayggncaraarggngaratgggntayggngcnccnggnmgnccnggngarmgnggnytnccnggnccncarggnccnacnggnccnwsnggnccnccnggngtnggnaarmgnggngaraayggngtnccnggncarccnggnathaarggngaymgnggnttyccnggngaratgggnccnathggnccnccnggnccncarggnccnccnggngarmgnggnccngarggnathggnaarccnggngcngcnggngcnccnggncarccnggnathccnggnacnaarggnytnccnggngcnccnggnathgcnggnccnccnggnccnccnggnttyggnaarccnggnytnccnggnytnaarggngarmgnggnccngcnggnytnccnggnggnccnggngcnaarggngarcarggnccngcnggnytnccnggnaarccnggnytnacnggnccnccnggnaayatgggnccncarggnccnaarggnathccnggnwsncayggnytnccnggnccnaarggngaracnggnccngcnggnccngcnggntayccnggngcnaarggngarmgnggnwsnccnggnwsngayggnaarccnggntayccnggnaarccnggnytngayggnccnaarggnaayccnggnytnccnggnccnaarggngayccnggngtnggnggnccnccnggnytnccnggnccngtnggnccngcnggngcnaarggnatgccnggncayaayggngargcnggnccnmgnggngcnccnggnathccnggnacnmgnggnccnathggnccnccnggnathccnggnttyccnggnwsnaarggngayccnggnwsnccnggnccnccnggnccngcnggnathgcnacnaarggnytnaayggnccnacnggnccnccnggnccnccnggnccnmgnggncaywsnggngarccnggnytnccnggnccnccnggnccnccnggnccnccnggncargcn

SEQ ID NO: 1121 - DNA, 3042 bp, Artificial Sequence
  hCol-CNA26 (alpha1(XI) THD)
  misc_feature (3)..(3): n is a, c, g, or t
  misc_feature (6)..(6): n is a, c, g, or t
  misc_feature (9)..(9): n is a, c, g, or t
  misc_feature (12)..(12): n is a, c, g, or t
  misc_feature (15)..(15): n is a, c, g, or t
  misc_feature (21)..(21): n is a, c, g, or t
  misc_feature (24)..(24): n is a, c, g, or t
  misc_feature (27)..(27): n is a, c, g, or t
  misc_feature (30)..(30): n is a, c, g, or t
  misc_feature (33)..(33): n is a, c, g, or t
  misc_feature (36)..(36): n is a, c, g, or t
  misc_feature (39)..(39): n is a, c, g, or t
  misc_feature (42)..(42): n is a, c, g, or t
  misc_feature (45)..(45): n is a, c, g, or t
  misc_feature (48)..(48): n is a, c, g, or t
  misc_feature (51)..(51): n is a, c, g, or t
  misc_feature (54)..(54): n is a, c, g, or t
  misc_feature (57)..(57): n is a, c, g, or t
  misc_feature (60)..(60): n is a, c, g, or t
  misc_feature (63)..(63): n is a, c, g, or t
  misc_feature (66)..(66): n is a, c, g, or t
  misc_feature (69)..(69): n is a, c, g, or t
  misc_feature (75)..(75): n is a, c, g, or t
  misc_feature (81)..(81): n is a, c, g, or t
  misc_feature (84)..(84): n is a, c, g, or t
  misc_feature (90)..(90): n is a, c, g, or t
  misc_feature (93)..(93): n is a, c, g, or t
  misc_feature (96)..(96): n is a, c, g, or t
  misc_feature (102)..(102): n is a, c, g, or t
  misc_feature (105)..(105): n is a, c, g, or t
  misc_feature (108)..(108): n is a, c, g, or t
  misc_feature (111)..(111): n is a, c, g, or t
  misc_feature (114)..(114): n is a, c, g, or t
  misc_feature (120)..(120): n is a, c, g, or t
  misc_feature (123)..(123): n is a, c, g, or t
  misc_feature (126)..(126): n is a, c, g, or t
  misc_feature (129)..(129): n is a, c, g, or t
  misc_feature (132)..(132): n is a, c, g, or t
  misc_feature (135)..(135): n is a, c, g, or t
  misc_feature (138)..(138): n is a, c, g, or t
  misc_feature (144)..(144): n is a, c, g, or t
  misc_feature (147)..(147): n is a, c, g, or t
  misc_feature (153)..(153): n is a, c, g, or t
  misc_feature (156)..(156): n is a, c, g, or t
  misc_feature (159)..(159): n is a, c, g, or t
  misc_feature (162)..(162): n is a, c, g, or t
  misc_feature (165)..(165): n is a, c, g, or t
  misc_feature (168)..(168): n is a, c, g, or t
  misc_feature (174)..(174): n is a, c, g, or t
  misc_feature (177)..(177): n is a, c, g, or t
  misc_feature (180)..(180): n is a, c, g, or t
  misc_feature (183)..(183): n is a, c, g, or t
  misc_feature (189)..(189): n is a, c, g, or t
  misc_feature (192)..(192): n is a, c, g, or t
  misc_feature (198)..(198): n is a, c, g, or t
  misc_feature (201)..(201): n is a, c, g, or t
  misc_feature (204)..(204): n is a, c, g, or t
  misc_feature (210)..(210): n is a, c, g, or t
  misc_feature (216)..(216): n is a, c, g, or t
  misc_feature (219)..(219): n is a, c, g, or t
  misc_feature (228)..(228): n is a, c, g, or t
  misc_feature (231)..(231): n is a, c, g, or t
  misc_feature (234)..(234): n is a, c, g, or t
  misc_feature (237)..(237): n is a, c, g, or t
  misc_feature (240)..(240): n is a, c, g, or t
  misc_feature (243)..(243): n is a, c, g, or t
  misc_feature (246)..(246): n is a, c, g, or t
  misc_feature (255)..(255): n is a, c, g, or t
  misc_feature (261)..(261): n is a, c, g, or t
  misc_feature (264)..(264): n is a, c, g, or t
  misc_feature (270)..(270): n is a, c, g, or t
  misc_feature (273)..(273): n is a, c, g, or t
  misc_feature (276)..(276): n is a, c, g, or t
  misc_feature (282)..(282): n is a, c, g, or t
  misc_feature (285)..(285): n is a, c, g, or t
  misc_feature (288)..(288): n is a, c, g, or t
  misc_feature (291)..(291): n is a, c, g, or t
  misc_feature (294)..(294): n is a, c, g, or t
  misc_feature (297)..(297): n is a, c, g, or t
  misc_feature (300)..(300): n is a, c, g, or t
  misc_feature (309)..(309): n is a, c, g, or t
  misc_feature (315)..(315): n is a, c, g, or t
  misc_feature (318)..(318): n is a, c, g, or t
  misc_feature (327)..(327): n is a, c, g, or t
  misc_feature (336)..(336): n is a, c, g, or t
  misc_feature (339)..(339): n is a, c, g, or t
  misc_feature (342)..(342): n is a, c, g, or t
  misc_feature (345)..(345): n is a, c, g, or t
  misc_feature (348)..(348): n is a, c, g, or t
  misc_feature (351)..(351): n is a, c, g, or t
  misc_feature (354)..(354): n is a, c, g, or t
  misc_feature (360)..(360): n is a, c, g, or t
  misc_feature (363)..(363): n is a, c, g, or t
  misc_feature (366)..(366): n is a, c, g, or t
  misc_feature (369)..(369): n is a, c, g, or t
  misc_feature (372)..(372): n is a, c, g, or t
  misc_feature (375)..(375): n is a, c, g, or t
  misc_feature (378)..(378): n is a, c, g, or t
  misc_feature (381)..(381): n is a, c, g, or t
  misc_feature (384)..(384): n is a, c, g, or t
  misc_feature (387)..(387): n is a, c, g, or t
  misc_feature (390)..(390): n is a, c, g, or t
  misc_feature (393)..(393): n is a, c, g, or t
  misc_feature (396)..(396): n is a, c, g, or t
  misc_feature (399)..(399): n is a, c, g, or t
  misc_feature (402)..(402): n is a, c, g, or t
  misc_feature (405)..(405): n is a, c, g, or t
  misc_feature (408)..(408): n is a, c, g, or t
  misc_feature (414)..(414): n is a, c, g, or t
  misc_feature (417)..(417): n is a, c, g, or t
  misc_feature (423)..(423): n is a, c, g, or t
  misc_feature (426)..(426): n is a, c, g, or t
  misc_feature (429)..(429): n is a, c, g, or t
  misc_feature (435)..(435): n is a, c, g, or t
  misc_feature (438)..(438): n is a, c, g, or t
  misc_feature (441)..(441): n is a, c, g, or t
  misc_feature (444)..(444): n is a, c, g, or t
  misc_feature (447)..(447): n is a, c, g, or t
  misc_feature (453)..(453): n is a, c, g, or t
  misc_feature (462)..(462): n is a, c, g, or t
  misc_feature (465)..(465): n is a, c, g, or t
  misc_feature (471)..(471): n is a, c, g, or t
  misc_feature (477)..(477): n is a, c, g, or t
  misc_feature (480)..(480): n is a, c, g, or t
  misc_feature (483)..(483): n is a, c, g, or t
  misc_feature (486)..(486): n is a, c, g, or t
  misc_feature (489)..(489): n is a, c, g, or t
  misc_feature (498)..(498): n is a, c, g, or t
  misc_feature (504)..(504): n is a, c, g, or t
  misc_feature (507)..(507): n is a, c, g, or t
  misc_feature (510)..(510): n is a, c, g, or t
  misc_feature (516)..(516): n is a, c, g, or t
  misc_feature (519)..(519): n is a, c, g, or t
  misc_feature (522)..(522): n is a, c, g, or t
  misc_feature (525)..(525): n is a, c, g, or t
  misc_feature (528)..(528): n is a, c, g, or t
  misc_feature (534)..(534): n is a, c, g, or t
  misc_feature (537)..(537): n is a, c, g, or t
  misc_feature (543)..(543): n is a, c, g, or t
  misc_feature (546)..(546): n is a, c, g, or t
  misc_feature (549)..(549): n is a, c, g, or t
  misc_feature (552)..(552): n is a, c, g, or t
  misc_feature (561)..(561): n is a, c, g, or t
  misc_feature (564)..(564): n is a, c, g, or t
  misc_feature (570)..(570): n is a, c, g, or t
  misc_feature (576)..(576): n is a, c, g, or t
  misc_feature (579)..(579): n is a, c, g, or t
  misc_feature (582)..(582): n is a, c, g, or t
  misc_feature (585)..(585): n is a, c, g, or t
  misc_feature (588)..(588): n is a, c, g, or t
  misc_feature (591)..(591): n is a, c, g, or t
  misc_feature (594)..(594): n is a, c, g, or t
  misc_feature (597)..(597): n is a, c, g, or t
  misc_feature (600)..(600): n is a, c, g, or t
  misc_feature (606)..(606): n is a, c, g, or t
  misc_feature (609)..(609): n is a, c, g, or t
  misc_feature (612)..(612): n is a, c, g, or t
  misc_feature (615)..(615): n is a, c, g, or t
  misc_feature (621)..(621): n is a, c, g, or t
  misc_feature (624)..(624): n is a, c, g, or t
  misc_feature (633)..(633): n is a, c, g, or t
  misc_feature (639)..(639): n is a, c, g, or t
  misc_feature (642)..(642): n is a, c, g, or t
  misc_feature (651)..(651): n is a, c, g, or t
  misc_feature (654)..(654): n is a, c, g, or t
  misc_feature (657)..(657): n is a, c, g, or t
  misc_feature (660)..(660): n is a, c, g, or t
  misc_feature (663)..(663): n is a, c, g, or t
  misc_feature (666)..(666): n is a, c, g, or t
  misc_feature (669)..(669): n is a, c, g, or t
  misc_feature (672)..(672): n is a, c, g, or t
  misc_feature (678)..(678): n is a, c, g, or t
  misc_feature (681)..(681): n is a, c, g, or t
  misc_feature (687)..(687): n is a, c, g, or t
  misc_feature (693)..(693): n is a, c, g, or t
  misc_feature (696)..(696): n is a, c, g, or t
  misc_feature (699)..(699): n is a, c, g, or t
  misc_feature (702)..(702): n is a, c, g, or t
  misc_feature (705)..(705): n is a, c, g, or t
  misc_feature (708)..(708): n is a, c, g, or t
  misc_feature (714)..(714): n is a, c, g, or t
  misc_feature (717)..(717): n is a, c, g, or t
  misc_feature (723)..(723): n is a, c, g, or t
  misc_feature (726)..(726): n is a, c, g, or t
  misc_feature (729)..(729): n is a, c, g, or t
  misc_feature (732)..(732): n is a, c, g, or t
  misc_feature (735)..(735): n is a, c, g, or t
  misc_feature (741)..(741): n is a, c, g, or t
  misc_feature (744)..(744): n is a, c, g, or t
  misc_feature (750)..(750): n is a, c, g, or t
  misc_feature (759)..(759): n is a, c, g, or t
  misc_feature (768)..(768): n is a, c, g, or t
  misc_feature (774)..(774): n is a, c, g, or t
  misc_feature (777)..(777): n is a, c, g, or t
  misc_feature (786)..(786): n is a, c, g, or t
  misc_feature (795)..(795): n is a, c, g, or t
  misc_feature (798)..(798): n is a, c, g, or t
  misc_feature (804)..(804): n is a, c, g, or t
  misc_feature (810)..(810): n is a, c, g, or t
  misc_feature (813)..(813): n is a, c, g, or t
  misc_feature (819)..(819): n is a, c, g, or t
  misc_feature (822)..(822): n is a, c, g, or t
  misc_feature (831)..(831): n is a, c, g, or t
  misc_feature (834)..(834): n is a, c, g, or t
  misc_feature (837)..(837): n is a, c, g, or t
  misc_feature (840)..(840): n is a, c, g, or t
  misc_feature (849)..(849): n is a, c, g, or t
  misc_feature (852)..(852): n is a, c, g, or t
  misc_feature (858)..(858): n is a, c, g, or t
  misc_feature (861)..(861): n is a, c, g, or t
  misc_feature (867)..(867): n is a, c, g, or t
  misc_feature (870)..(870): n is a, c, g, or t
  misc_feature (873)..(873): n is a, c, g, or t
  misc_feature (876)..(876): n is a, c, g, or t
  misc_feature (879)..(879): n is a, c, g, or t
  misc_feature (882)..(882): n is a, c, g, or t
  misc_feature (885)..(885): n is a, c, g, or t
  misc_feature (891)..(891): n is a, c, g, or t
  misc_feature (894)..(894): n is a, c, g, or t
  misc_feature (897)..(897): n is a, c, g, or t
  misc_feature (900)..(900): n is a, c, g, or t
  misc_feature (903)..(903): n is a, c, g, or t
  misc_feature (909)..(909): n is a, c, g, or t
  misc_feature (912)..(912): n is a, c, g, or t
  misc_feature (921)..(921): n is a, c, g, or t
  misc_feature (927)..(927): n is a, c, g, or t
  misc_feature (930)..(930): n is a, c, g, or t
  misc_feature (933)..(933): n is a, c, g, or t
  misc_feature (936)..(936): n is a, c, g, or t
  misc_feature (939)..(939): n is a, c, g, or t
  misc_feature (942)..(942): n is a, c, g, or t
  misc_feature (945)..(945): n is a, c, g, or t
  misc_feature (948)..(948): n is a, c, g, or t
  misc_feature (954)..(954): n is a, c, g, or t
  misc_feature (957)..(957): n is a, c, g, or t
  misc_feature (960)..(960): n is a, c, g, or t
  misc_feature (966)..(966): n is a, c, g, or t
  misc_feature (969)..(969): n is a, c, g, or t
  misc_feature (975)..(975): n is a, c, g, or t
  misc_feature (978)..(978): n is a, c, g, or t
  misc_feature (981)..(981): n is a, c, g, or t
  misc_feature (984)..(984): n is a, c, g, or t
  misc_feature (990)..(990): n is a, c, g, or t
  misc_feature (993)..(993): n is a, c, g, or t
  misc_feature (999)..(999): n is a, c, g, or t
  misc_feature (1002)..(1002): n is a, c, g, or t
  misc_feature (1005)..(1005): n is a, c, g, or t
  misc_feature (1011)..(1011): n is a, c, g, or t
  misc_feature (1020)..(1020): n is a, c, g, or t
  misc_feature (1023)..(1023): n is a, c, g, or t
  misc_feature (1026)..(1026): n is a, c, g, or t
  misc_feature (1029)..(1029): n is a, c, g, or t
  misc_feature (1032)..(1032): n is a, c, g, or t
  misc_feature (1035)..(1035): n is a, c, g, or t
  misc_feature (1038)..(1038): n is a, c, g, or t
  misc_feature (1044)..(1044): n is a, c, g, or t
  misc_feature (1047)..(1047): n is a, c, g, or t
  misc_feature (1050)..(1050): n is a, c, g, or t
  misc_feature (1053)..(1053): n is a, c, g, or t
  misc_feature (1056)..(1056): n is a, c, g, or t
  misc_feature (1062)..(1062): n is a, c, g, or t
  misc_feature (1065)..(1065): n is a, c, g, or t
  misc_feature (1068)..(1068): n is a, c, g, or t
  misc_feature (1071)..(1071): n is a, c, g, or t
  misc_feature (1074)..(1074): n is a, c, g, or t
  misc_feature (1077)..(1077): n is a, c, g, or t
  misc_feature (1080)..(1080): n is a, c, g, or t
  misc_feature (1083)..(1083): n is a, c, g, or t
  misc_feature (1086)..(1086): n is a, c, g, or t
  misc_feature (1089)..(1089): n is a, c, g, or t
  misc_feature (1092)..(1092): n is a, c, g, or t
  misc_feature (1095)..(1095): n is a, c, g, or t
  misc_feature (1098)..(1098): n is a, c, g, or t
  misc_feature (1101)..(1101): n is a, c, g, or t
  misc_feature (1104)..(1104): n is a, c, g, or t
  misc_feature (1107)..(1107): n is a, c, g, or t
  misc_feature (1110)..(1110): n is a, c, g, or t
  misc_feature (1116)..(1116): n is a, c, g, or t
  misc_feature (1119)..(1119): n is a, c, g, or t
  misc_feature (1122)..(1122): n is a, c, g, or t
  misc_feature (1128)..(1128): n is a, c, g, or t
  misc_feature (1131)..(1131): n is a, c, g, or t
  misc_feature (1134)..(1134): n is a, c, g, or t
  misc_feature (1137)..(1137): n is a, c, g, or t
  misc_feature (1140)..(1140): n is a, c, g, or t
  misc_feature (1146)..(1146): n is a, c, g, or t
  misc_feature (1149)..(1149): n is a, c, g, or t
  misc_feature (1152)..(1152): n is a, c, g, or t
  misc_feature (1155)..(1155): n is a, c, g, or t
  misc_feature (1158)..(1158): n is a, c, g, or t
  misc_feature (1161)..(1161): n is a, c, g, or t
  misc_feature (1164)..(1164): n is a, c, g, or t
  misc_feature (1170)..(1170): n is a, c, g, or t
  misc_feature (1173)..(1173): n is a, c, g, or t
  misc_feature (1176)..(1176): n is a, c, g, or t
  misc_feature (1182)..(1182): n is a, c, g, or t
  misc_feature (1185)..(1185): n is a, c, g, or t
  misc_feature (1191)..(1191): n is a, c, g, or t
  misc_feature (1194)..(1194): n is a, c, g, or t
  misc_feature (1197)..(1197): n is a, c, g, or t
  misc_feature (1200)..(1200): n is a, c, g, or t
  misc_feature (1206)..(1206): n is a, c, g, or t
  misc_feature (1209)..(1209): n is a, c, g, or t
  misc_feature (1212)..(1212): n is a, c, g, or t
  misc_feature (1218)..(1218): n is a, c, g, or t
  misc_feature (1221)..(1221): n is a, c, g, or t
  misc_feature (1224)..(1224): n is a, c, g, or t
  misc_feature (1227)..(1227): n is a, c, g, or t
  misc_feature (1230)..(1230): n is a, c, g, or t
  misc_feature (1233)..(1233): n is a, c, g, or t
  misc_feature (1236)..(1236): n is a, c, g, or t
  misc_feature (1245)..(1245): n is a, c, g, or t
  misc_feature (1248)..(1248): n is a, c, g, or t
  misc_feature (1251)..(1251): n is a, c, g, or t
  misc_feature (1254)..(1254): n is a, c, g, or t
  misc_feature (1260)..(1260): n is a, c, g, or t
  misc_feature (1263)..(1263): n is a, c, g, or t
  misc_feature (1269)..(1269): n is a, c, g, or t
  misc_feature (1272)..(1272): n is a, c, g, or t
  misc_feature (1278)..(1278): n is a, c, g, or t
  misc_feature (1281)..(1281): n is a, c, g, or t
  misc_feature (1290)..(1290): n is a, c, g, or t
  misc_feature (1296)..(1296): n is a, c, g, or t
  misc_feature (1299)..(1299): n is a, c, g, or t
  misc_feature (1302)..(1302): n is a, c, g, or t
  misc_feature (1305)..(1305): n is a, c, g, or t
  misc_feature (1308)..(1308): n is a, c, g, or t
  misc_feature (1311)..(1311): n is a, c, g, or t
  misc_feature (1314)..(1314): n is a, c, g, or t
  misc_feature (1317)..(1317): n is a, c, g, or t
  misc_feature (1320)..(1320): n is a, c, g, or t
  misc_feature (1323)..(1323): n is a, c, g, or t
  misc_feature (1326)..(1326): n is a, c, g, or t
  misc_feature (1329)..(1329): n is a, c, g, or t
  misc_feature (1335)..(1335): n is a, c, g, or t
  misc_feature (1338)..(1338): n is a, c, g, or t
  misc_feature (1341)..(1341): n is a, c, g, or t
  misc_feature (1344)..(1344): n is a, c, g, or t
  misc_feature (1350)..(1350): n is a, c, g, or t
  misc_feature (1353)..(1353): n is a, c, g, or t
  misc_feature (1356)..(1356): n is a, c, g, or t
  misc_feature (1362)..(1362): n is a, c, g, or t
  misc_feature (1368)..(1368): n is a, c, g, or t
  misc_feature (1371)..(1371): n is a, c, g, or t
  misc_feature (1377)..(1377): n is a, c, g, or t
  misc_feature (1380)..(1380): n is a, c, g, or t
  misc_feature (1383)..(1383): n is a, c, g, or t
  misc_feature (1386)..(1386): n is a, c, g, or t
  misc_feature (1389)..(1389): n is a, c, g, or t
  misc_feature (1392)..(1392): n is a, c, g, or t
  misc_feature (1395)..(1395): n is a, c, g, or t
  misc_feature (1398)..(1398): n is a, c, g, or t
  misc_feature (1407)..(1407): n is a, c, g, or t
  misc_feature (1410)..(1410): n is a, c, g, or t
  misc_feature (1413)..(1413): n is a, c, g, or t
  misc_feature (1416)..(1416): n is a, c, g, or t
  misc_feature (1419)..(1419): n is a, c, g, or t
  misc_feature (1422)..(1422): n is a, c, g, or t
  misc_feature (1425)..(1425): n is a, c, g, or t
  misc_feature (1434)..(1434): n is a, c, g, or t
  misc_feature (1437)..(1437): n is a, c, g, or t
  misc_feature (1443)..(1443): n is a, c, g, or t
  misc_feature (1449)..(1449): n is a, c, g, or t
  misc_feature (1452)..(1452): n is a, c, g, or t
  misc_feature (1455)..(1455): n is a, c, g, or t
  misc_feature (1461)..(1461): n is a, c, g, or t
  misc_feature (1467)..(1467): n is a, c, g, or t
  misc_feature (1470)..(1470): n is a, c, g, or t
  misc_feature (1479)..(1479): n is a, c, g, or t
  misc_feature (1482)..(1482): n is a, c, g, or t
  misc_feature (1485)..(1485): n is a, c, g, or t
  misc_feature (1488)..(1488): n is a, c, g, or t
  misc_feature (1491)..(1491): n is a, c, g, or t
  misc_feature (1494)..(1494): n is a, c, g, or t
  misc_feature (1497)..(1497): n is a, c, g, or t
  misc_feature (1503)..(1503): n is a, c, g, or t
  misc_feature (1506)..(1506): n is a, c, g, or t
  misc_feature (1512)..(1512): n is a, c, g, or t
  misc_feature (1515)..(1515): n is a, c, g, or t
  misc_feature (1518)..(1518): n is a, c, g, or t
  misc_feature (1521)..(1521): n is a, c, g, or t
  misc_feature (1524)..(1524): n is a, c, g, or t
  misc_feature (1527)..(1527): n is a, c, g, or t
  misc_feature (1533)..(1533): n is a, c, g, or t
  misc_feature (1536)..(1536): n is a, c, g, or t
  misc_feature (1539)..(1539): n is a, c, g, or t
  misc_feature (1542)..(1542): n is a, c, g, or t
  misc_feature (1545)..(1545): n is a, c, g, or t
  misc_feature (1551)..(1551): n is a, c, g, or t
  misc_feature (1554)..(1554): n is a, c, g, or t
  misc_feature (1560)..(1560): n is a, c, g, or t
  misc_feature (1563)..(1563): n is a, c, g, or t
  misc_feature (1569)..(1569): n is a, c, g, or t
  misc_feature (1572)..(1572): n is a, c, g, or t
  misc_feature (1575)..(1575): n is a, c, g, or t
  misc_feature (1578)..(1578): n is a, c, g, or t
  misc_feature (1581)..(1581): n is a, c, g, or t
  misc_feature (1584)..(1584): n is a, c, g, or t
  misc_feature (1587)..(1587): n is a, c, g, or t
  misc_feature (1590)..(1590): n is a, c, g, or t
  misc_feature (1593)..(1593): n is a, c, g, or t
  misc_feature (1596)..(1596): n is a, c, g, or t
  misc_feature (1602)..(1602): n is a, c, g, or t
  misc_feature (1605)..(1605): n is a, c, g, or t
  misc_feature (1608)..(1608): n is a, c, g, or t
  misc_feature (1611)..(1611): n is a, c, g, or t
  misc_feature (1614)..(1614): n is a, c, g, or t
  misc_feature (1617)..(1617): n is a, c, g, or t
  misc_feature (1620)..(1620): n is a, c, g, or t
  misc_feature (1623)..(1623): n is a, c, g, or t
  misc_feature (1626)..(1626): n is a, c, g, or t
  misc_feature (1632)..(1632): n is a, c, g, or t
  misc_feature (1635)..(1635): n is a, c, g, or t
  misc_feature (1638)..(1638): n is a, c, g, or t
  misc_feature (1641)..(1641): n is a, c, g, or t
  misc_feature (1644)..(1644): n is a, c, g, or t
  misc_feature (1647)..(1647): n is a, c, g, or t
  misc_feature (1650)..(1650): n is a, c, g, or t
  misc_feature (1653)..(1653): n is a, c, g, or t
  misc_feature (1659)..(1659): n is a, c, g, or t
  misc_feature (1662)..(1662): n is a, c, g, or t
  misc_feature (1665)..(1665): n is a, c, g, or t
  misc_feature (1668)..(1668): n is a, c, g, or t
  misc_feature (1671)..(1671): n is a, c, g, or t
  misc_feature (1674)..(1674): n is a, c, g, or t
  misc_feature (1677)..(1677): n is a, c, g, or t
  misc_feature (1686)..(1686): n is a, c, g, or t
  misc_feature (1689)..(1689): n is a, c, g, or t
  misc_feature (1692)..(1692): n is a, c, g, or t
  misc_feature (1695)..(1695): n is a, c, g, or t
  misc_feature (1704)..(1704): n is a, c, g, or t
  misc_feature (1707)..(1707): n is a, c, g, or t
  misc_feature (1713)..(1713): n is a, c, g, or t
  misc_feature (1716)..(1716): n is a, c, g, or t
  misc_feature (1719)..(1719): n is a, c, g, or t
  misc_feature (1722)..(1722): n is a, c, g, or t
  misc_feature (1725)..(1725): n is a, c, g, or t
  misc_feature (1731)..(1731): n is a, c, g, or t
  misc_feature (1734)..(1734): n is a, c, g, or t
  misc_feature (1740)..(1740): n is a, c, g, or t
  misc_feature (1743)..(1743): n is a, c, g, or t
  misc_feature (1746)..(1746): n is a, c, g, or t
  misc_feature (1749)..(1749): n is a, c, g, or t
  misc_feature (1752)..(1752): n is a, c, g, or t
  misc_feature (1755)..(1755): n is a, c, g, or t
  misc_feature (1758)..(1758): n is a, c, g, or t
  misc_feature (1761)..(1761): n is a, c, g, or t
  misc_feature (1764)..(1764): n is a, c, g, or t
  misc_feature (1767)..(1767): n is a, c, g, or t
  misc_feature (1770)..(1770): n is a, c, g, or t
  misc_feature (1773)..(1773): n is a, c, g, or t
  misc_feature (1776)..(1776): n is a, c, g, or t
  misc_feature (1779)..(1779): n is a, c, g, or t
  misc_feature (1782)..(1782): n is a, c, g, or t
  misc_feature (1785)..(1785): n is a, c, g, or t
  misc_feature (1794)..(1794): n is a, c, g, or t
  misc_feature (1803)..(1803): n is a, c, g, or t
  misc_feature (1812)..(1812): n is a, c, g, or t
  misc_feature (1818)..(1818): n is a, c, g, or t
  misc_feature (1821)..(1821): n is a, c, g, or t
  misc_feature (1830)..(1830): n is a, c, g, or t
  misc_feature (1833)..(1833): n is a, c, g, or t
  misc_feature (1839)..(1839): n is a, c, g, or t
  misc_feature (1848)..(1848): n is a, c, g, or t
  misc_feature (1857)..(1857): n is a, c, g, or t
  misc_feature (1860)..(1860): n is a, c, g, or t
  misc_feature (1863)..(1863): n is a, c, g, or t
  misc_feature (1866)..(1866): n is a, c, g, or t
  misc_feature (1869)..(1869): n is a, c, g, or t
  misc_feature (1872)..(1872): n is a, c, g, or t
  misc_feature (1875)..(1875): n is a, c, g, or t
  misc_feature (1878)..(1878): n is a, c, g, or t
  misc_feature (1884)..(1884): n is a, c, g, or t
  misc_feature (1887)..(1887): n is a, c, g, or t
  misc_feature (1890)..(1890): n is a, c, g, or t
  misc_feature (1893)..(1893): n is a, c, g, or t
  misc_feature (1896)..(1896): n is a, c, g, or t
  misc_feature (1899)..(1899): n is a, c, g, or t
  misc_feature (1902)..(1902): n is a, c, g, or t
  misc_feature (1908)..(1908): n is a, c, g, or t
  misc_feature (1911)..(1911): n is a, c, g, or t
  misc_feature (1914)..(1914): n is a, c, g, or t
  misc_feature (1920)..(1920): n is a, c, g, or t
  misc_feature (1926)..(1926): n is a, c, g, or t
  misc_feature (1929)..(1929): n is a, c, g, or t
  misc_feature (1932)..(1932): n is a, c, g, or t
  misc_feature (1935)..(1935): n is a, c, g, or t
  misc_feature (1938)..(1938): n is a, c, g, or t
  misc_feature (1947)..(1947): n is a, c, g, or t
  misc_feature (1956)..(1956): n is a, c, g, or t
  misc_feature (1965)..(1965): n is a, c, g, or t
  misc_feature (1974)..(1974): n is a, c, g, or t
  misc_feature (1977)..(1977): n is a, c, g, or t
  misc_feature (1980)..(1980): n is a, c, g, or t
  misc_feature (1983)..(1983): n is a, c, g, or t
  misc_feature (1989)..(1989): n is a, c, g, or t
  misc_feature (1992)..(1992): n is a, c, g, or t
  misc_feature (1995)..(1995): n is a, c, g, or t
  misc_feature (1998)..(1998): n is a, c, g, or t
  misc_feature (2001)..(2001): n is a, c, g, or t
  misc_feature (2004)..(2004): n is a, c, g, or t
  misc_feature (2010)..(2010): n is a, c, g, or t
  misc_feature (2013)..(2013): n is a, c, g, or t
  misc_feature (2019)..(2019): n is a, c, g, or t
  misc_feature (2022)..(2022): n is a, c, g, or t
  misc_feature (2025)..(2025): n is a, c, g, or t
  misc_feature (2028)..(2028): n is a, c, g, or t
  misc_feature (2031)..(2031): n is a, c, g, or t
  misc_feature (2034)..(2034): n is a, c, g, or t
  misc_feature (2037)..(2037): n is a, c, g, or t
  misc_feature (2046)..(2046): n is a, c, g, or t
  misc_feature (2055)..(2055): n is a, c, g, or t
  misc_feature (2061)..(2061): n is a, c, g, or t
  misc_feature (2064)..(2064): n is a, c, g, or t
  misc_feature (2067)..(2067): n is a, c, g, or t
  misc_feature (2073)..(2073): n is a, c, g, or t
  misc_feature (2076)..(2076): n is a, c, g, or t
  misc_feature (2079)..(2079): n is a, c, g, or t
  misc_feature (2082)..(2082): n is a, c, g, or t
  misc_feature (2085)..(2085): n is a, c, g, or t
  misc_feature (2088)..(2088): n is a, c, g, or t
  misc_feature (2091)..(2091): n is a, c, g, or t
  misc_feature (2094)..(2094): n is a, c, g, or t
  misc_feature (2097)..(2097): n is a, c, g, or t
  misc_feature (2100)..(2100): n is a, c, g, or t
  misc_feature (2103)..(2103): n is a, c, g, or t
  misc_feature (2109)..(2109): n is a, c, g, or t
  misc_feature (2112)..(2112): n is a, c, g, or t
  misc_feature (2118)..(2118): n is a, c, g, or t
  misc_feature (2121)..(2121): n is a, c, g, or t
  misc_feature (2127)..(2127): n is a, c, g, or t
  misc_feature (2130)..(2130): n is a, c, g, or t
  misc_feature (2136)..(2136): n is a, c, g, or t
  misc_feature (2139)..(2139): n is a, c, g, or t
  misc_feature (2142)..(2142): n is a, c, g, or t
  misc_feature (2145)..(2145): n is a, c, g, or t
  misc_feature (2148)..(2148): n is a, c, g, or t
  misc_feature (2151)..(2151): n is a, c, g, or t
  misc_feature (2154)..(2154): n is a, c, g, or t
  misc_feature (2157)..(2157): n is a, c, g, or t
  misc_feature (2160)..(2160): n is a, c, g, or t
  misc_feature (2163)..(2163): n is a, c, g, or t
  misc_feature (2166)..(2166): n is a, c, g, or t
  misc_feature (2169)..(2169): n is a, c, g, or t
  misc_feature (2172)..(2172): n is a, c, g, or t
  misc_feature (2181)..(2181): n is a, c, g, or t
  misc_feature (2187)..(2187): n is a, c, g, or t
  misc_feature (2190)..(2190): n is a, c, g, or t
  misc_feature (2196)..(2196): n is a, c, g, or t
  misc_feature (2199)..(2199): n is a, c, g, or t
  misc_feature (2205)..(2205): n is a, c, g, or t
  misc_feature (2208)..(2208): n is a, c, g, or t
  misc_feature (2211)..(2211): n is a, c, g, or t
  misc_feature (2214)..(2214): n is a, c, g, or t
  misc_feature (2217)..(2217): n is a, c, g, or t
  misc_feature (2223)..(2223): n is a, c, g, or t
  misc_feature (2226)..(2226): n is a, c, g, or t
  misc_feature (2229)..(2229): n is a, c, g, or t
  misc_feature (2232)..(2232): n is a, c, g, or t
  misc_feature (2235)..(2235): n is a, c, g, or t
  misc_feature (2238)..(2238): n is a, c, g, or t
  misc_feature (2244)..(2244): n is a, c, g, or t
  misc_feature (2250)..(2250): n is a, c, g, or t
  misc_feature (2253)..(2253): n is a, c, g, or t
  misc_feature (2262)..(2262): n is a, c, g, or t
  misc_feature (2268)..(2268): n is a, c, g, or t
  misc_feature (2271)..(2271): n is a, c, g, or t
  misc_feature (2274)..(2274): n is a, c, g, or t
  misc_feature (2277)..(2277): n is a, c, g, or t
  misc_feature (2280)..(2280): n is a, c, g, or t
  misc_feature (2283)..(2283): n is a, c, g, or t
  misc_feature (2286)..(2286): n is a, c, g, or t
  misc_feature (2289)..(2289): n is a, c, g, or t
  misc_feature (2292)..(2292): n is a, c, g, or t
  misc_feature (2295)..(2295): n is a, c, g, or t
  misc_feature (2298)..(2298): n is a, c, g, or t
  misc_feature (2301)..(2301): n is a, c, g, or t
  misc_feature (2307)..(2307): n is a, c, g, or t
  misc_feature (2310)..(2310): n is a, c, g, or t
  misc_feature (2313)..(2313): n is a, c, g, or t
  misc_feature (2316)..(2316): n is a, c, g, or t
  misc_feature (2325)..(2325): n is a, c, g, or t
  misc_feature (2328)..(2328): n is a, c, g, or t
  misc_feature (2334)..(2334): n is a, c, g, or t
  misc_feature (2340)..(2340): n is a, c, g, or t
  misc_feature (2343)..(2343): n is a, c, g, or t
  misc_feature (2346)..(2346): n is a, c, g, or t
  misc_feature (2349)..(2349): n is a, c, g, or t
  misc_feature (2352)..(2352): n is a, c, g, or t
  misc_feature (2358)..(2358): n is a, c, g, or t
  misc_feature (2361)..(2361): n is a, c, g, or t
  misc_feature (2367)..(2367): n is a, c, g, or t
  misc_feature (2370)..(2370): n is a, c, g, or t
  misc_feature (2373)..(2373): n is a, c, g, or t
  misc_feature (2376)..(2376): n is a, c, g, or t
  misc_feature (2379)..(2379): n is a, c, g, or t
  misc_feature (2385)..(2385): n is a, c, g, or t
  misc_feature (2388)..(2388): n is a, c, g, or t
  misc_feature (2391)..(2391): n is a, c, g, or t
  misc_feature (2394)..(2394): n is a, c, g, or t
  misc_feature (2397)..(2397): n is a, c, g, or t
  misc_feature (2406)..(2406): n is a, c, g, or t
  misc_feature (2409)..(2409): n is a, c, g, or t
  misc_feature (2412)..(2412): n is a, c, g, or t
  misc_feature (2415)..(2415): n is a, c, g, or t
  misc_feature (2424)..(2424): n is a, c, g, or t
  misc_feature (2433)..(2433): n is a, c, g, or t
  misc_feature (2439)..(2439): n is a, c, g, or t
  misc_feature (2442)..(2442): n is a, c, g, or t
  misc_feature (2448)..(2448): n is a, c, g, or t
  misc_feature (2451)..(2451): n is a, c, g, or t
  misc_feature (2454)..(2454): n is a, c, g, or t
  misc_feature (2457)..(2457): n is a, c, g, or t
  misc_feature (2460)..(2460): n is a, c, g, or t
  misc_feature (2463)..(2463): n is a, c, g, or t
  misc_feature (2466)..(2466): n is a, c, g, or t
  misc_feature (2469)..(2469): n is a, c, g, or t
  misc_feature (2475)..(2475): n is a, c, g, or t
  misc_feature (2478)..(2478): n is a, c, g, or t
  misc_feature (2481)..(2481): n is a, c, g, or t
  misc_feature (2484)..(2484): n is a, c, g, or t
  misc_feature (2487)..(2487): n is a, c, g, or t
  misc_feature (2490)..(2490): n is a, c, g, or t
  misc_feature (2493)..(2493): n is a, c, g, or t
  misc_feature (2496)..(2496): n is a, c, g, or t
  misc_feature (2502)..(2502): n is a, c, g, or t
  misc_feature (2505)..(2505): n is a, c, g, or t
  misc_feature (2508)..(2508): n is a, c, g, or t
  misc_feature (2511)..(2511): n is a, c, g, or t
  misc_feature (2514)..(2514): n is a, c, g, or t
  misc_feature (2517)..(2517): n is a, c, g, or t
  misc_feature (2520)..(2520): n is a, c, g, or t
  misc_feature (2523)..(2523): n is a, c, g, or t
  misc_feature (2526)..(2526): n is a, c, g, or t
  misc_feature (2532)..(2532): n is a, c, g, or t
  misc_feature (2535)..(2535): n is a, c, g, or t
  misc_feature (2541)..(2541): n is a, c, g, or t
  misc_feature (2550)..(2550): n is a, c, g, or t
  misc_feature (2553)..(2553): n is a, c, g, or t
  misc_feature (2559)..(2559): n is a, c, g, or t
  misc_feature (2565)..(2565): n is a, c, g, or t
  misc_feature (2568)..(2568): n is a, c, g, or t
  misc_feature (2571)..(2571): n is a, c, g, or t
  misc_feature (2577)..(2577): n is a, c, g, or t
  misc_feature (2580)..(2580): n is a, c, g, or t
  misc_feature (2583)..(2583): n is a, c, g, or t
  misc_feature (2586)..(2586): n is a, c, g, or t
  misc_feature (2592)..(2592): n is a, c, g, or t
  misc_feature (2595)..(2595): n is a, c, g, or t
  misc_feature (2598)..(2598): n is a, c, g, or t
  misc_feature (2601)..(2601): n is a, c, g, or t
  misc_feature (2604)..(2604): n is a, c, g, or t
  misc_feature (2607)..(2607): n is a, c, g, or t
  misc_feature (2613)..(2613): n is a, c, g, or t
  misc_feature (2616)..(2616): n is a, c, g, or t
  misc_feature (2619)..(2619): n is a, c, g, or t
  misc_feature (2622)..(2622): n is a, c, g, or t
  misc_feature (2628)..(2628): n is a, c, g, or t
  misc_feature (2631)..(2631): n is a, c, g, or t
  misc_feature (2634)..(2634): n is a, c, g, or t
  misc_feature (2640)..(2640): n is a, c, g, or t
  misc_feature (2643)..(2643): n is a, c, g, or t
  misc_feature (2646)..(2646): n is a, c, g, or t
  misc_feature (2649)..(2649): n is a, c, g, or t
  misc_feature (2655)..(2655): n is a, c, g, or t
  misc_feature (2658)..(2658): n is a, c, g, or t
  misc_feature (2661)..(2661): n is a, c, g, or t
  misc_feature (2664)..(2664): n is a, c, g, or t
  misc_feature (2667)..(2667): n is a, c, g, or t
  misc_feature (2676)..(2676): n is a, c, g, or t
  misc_feature (2679)..(2679): n is a, c, g, or t
  misc_feature (2682)..(2682): n is a, c, g, or t
  misc_feature (2685)..(2685): n is a, c, g, or t
  misc_feature (2688)..(2688): n is a, c, g, or t
  misc_feature (2691)..(2691): n is a, c, g, or t
  misc_feature (2694)..(2694): n is a, c, g, or t
  misc_feature (2703)..(2703): n is a, c, g, or t
  misc_feature (2706)..(2706): n is a, c, g, or t
  misc_feature (2709)..(2709): n is a, c, g, or t
  misc_feature (2712)..(2712): n is a, c, g, or t
  misc_feature (2715)..(2715): n is a, c, g, or t
  misc_feature (2721)..(2721): n is a, c, g, or t
  misc_feature (2724)..(2724): n is a, c, g, or t
  misc_feature (2727)..(2727): n is a, c, g, or t
  misc_feature (2730)..(2730): n is a, c, g, or t
  misc_feature (2733)..(2733): n is a, c, g, or t
  misc_feature (2736)..(2736): n is a, c, g, or t
  misc_feature (2739)..(2739): n is a, c, g, or t
  misc_feature (2742)..(2742): n is a, c, g, or t
  misc_feature (2748)..(2748): n is a, c, g, or t
  misc_feature (2754)..(2754): n is a, c, g, or t
  misc_feature (2757)..(2757): n is a, c, g, or t
  misc_feature (2760)..(2760): n is a, c, g, or t
  misc_feature (2766)..(2766): n is a, c, g, or t
  misc_feature (2775)..(2775): n is a, c, g, or t
  misc_feature (2781)..(2781): n is a, c, g, or t
  misc_feature (2784)..(2784): n is a, c, g, or t
  misc_feature (2787)..(2787): n is a, c, g, or t
  misc_feature (2793)..(2793): n is a, c, g, or t
  misc_feature (2796)..(2796): n is a, c, g, or t
  misc_feature (2802)..(2802): n is a, c, g, or t
  misc_feature (2805)..(2805): n is a, c, g, or t
  misc_feature (2808)..(2808): n is a, c, g, or t
  misc_feature (2811)..(2811): n is a, c, g, or t
  misc_feature (2820)..(2820): n is a, c, g, or t
  misc_feature (2829)..(2829): n is a, c, g, or t
  misc_feature (2835)..(2835): n is a, c, g, or t
  misc_feature (2838)..(2838): n is a, c, g, or t
  misc_feature (2841)..(2841): n is a, c, g, or t
  misc_feature (2844)..(2844): n is a, c, g, or t
  misc_feature (2847)..(2847): n is a, c, g, or t
  misc_feature (2850)..(2850): n is a, c, g, or t
  misc_feature (2856)..(2856): n is a, c, g, or t
  misc_feature (2859)..(2859): n is a, c, g, or t
  misc_feature (2862)..(2862): n is a, c, g, or t
  misc_feature (2865)..(2865): n is a, c, g, or t
  misc_feature (2868)..(2868): n is a, c, g, or t
  misc_feature (2874)..(2874): n is a, c, g, or t
  misc_feature (2880)..(2880): n is a, c, g, or t
  misc_feature (2883)..(2883): n is a, c, g, or t
  misc_feature (2889)..(2889): n is a, c, g, or t
  misc_feature (2892)..(2892): n is a, c, g, or t
  misc_feature (2895)..(2895): n is a, c, g, or t
  misc_feature (2898)..(2898): n is a, c, g, or t
  misc_feature (2901)..(2901): n is a, c, g, or t
  misc_feature (2904)..(2904): n is a, c, g, or t
  misc_feature (2907)..(2907): n is a, c, g, or t
  misc_feature (2910)..(2910): n is a, c, g, or t
  misc_feature (2913)..(2913): n is a, c, g, or t
  misc_feature (2916)..(2916): n is a, c, g, or t
  misc_feature (2919)..(2919): n is a, c, g, or t
  misc_feature (2922)..(2922): n is a, c, g, or t
  misc_feature (2925)..(2925): n is a, c, g, or t
  misc_feature (2928)..(2928): n is a, c, g, or t
  misc_feature (2931)..(2931): n is a, c, g, or t
  misc_feature (2934)..(2934): n is a, c, g, or t
  misc_feature (2937)..(2937): n is a, c, g, or t
  misc_feature (2940)..(2940): n is a, c, g, or t
  misc_feature (2946)..(2946): n is a, c, g, or t
  misc_feature (2949)..(2949): n is a, c, g, or t
  misc_feature (2955)..(2955): n is a, c, g, or t
  misc_feature (2964)..(2964): n is a, c, g, or t
  misc_feature (2967)..(2967): n is a, c, g, or t
  misc_feature (2970)..(2970): n is a, c, g, or t
  misc_feature (2973)..(2973): n is a, c, g, or t
  misc_feature (2976)..(2976): n is a, c, g, or t
  misc_feature (2979)..(2979): n is a, c, g, or t
  misc_feature (2982)..(2982): n is a, c, g, or t
  misc_feature (2991)..(2991): n is a, c, g, or t
  misc_feature (2997)..(2997): n is a, c, g, or t
  misc_feature (3000)..(3000): n is a, c, g, or t
  misc_feature (3003)..(3003): n is a, c, g, or t
  misc_feature (3006)..(3006): n is a, c, g, or t
  misc_feature (3009)..(3009): n is a, c, g, or t
  misc_feature (3012)..(3012): n is a, c, g, or t
  misc_feature (3015)..(3015): n is a, c, g, or t
  misc_feature (3018)..(3018): n is a, c, g, or t
  misc_feature (3021)..(3021): n is a, c, g, or t
  misc_feature (3024)..(3024): n is a, c, g, or t
  misc_feature (3027)..(3027): n is a, c, g, or t
  misc_feature (3030)..(3030): n is a, c, g, or t
  misc_feature (3033)..(3033): n is a, c, g, or t
  misc_feature (3036)..(3036): n is a, c, g, or t
  misc_feature (3042)..(3042): n is a, c, g, or t
ggnccnccnggnccnatgggnytnacnggnmgnccnggnccngtnggnggnccnggnwsnwsnggngcnaarggngarwsnggngayccnggnccncarggnccnmgnggngtncarggnccnccnggnccnacnggnaarccnggnaarmgnggnmgnccnggngcngayggnggnmgnggnatgccnggngarccnggngcnaarggngaymgnggnttygayggnytnccnggnytnccnggngayaarggncaymgnggngarmgnggnccncarggnccnccnggnccnccnggngaygayggnatgmgnggngargayggngarathggnccnmgnggnytnccnggngargcnggnccnmgnggnytnytnggnccnmgnggnacnccnggngcnccnggncarccnggnatggcnggngtngayggnccnccnggnccnaarggnaayatgggnccncarggngarccnggnccnccnggncarcarggnaayccnggnccncarggnytnccnggnccncarggnccnathggnccnccnggngaraarggnccncarggnaarccnggnytngcnggnytnccnggngcngayggnccnccnggncayccnggnaargarggncarwsnggngaraarggngcnytnggnccnccnggnccncarggnccnathggntayccnggnccnmgnggngtnaarggngcngayggngtnmgnggnytnaarggnwsnaarggngaraarggngargayggnttyccnggnttyaarggngayatgggnytnaarggngaymgnggngargtnggncarathggnccnmgnggngargayggnccngarggnccnaarggnmgngcnggnccnacnggngayccnggnccnwsnggncargcnggngaraarggnaarytnggngtnccnggnytnccnggntayccnggnmgncarggnccnaarggnwsnacnggnttyccnggnttyccnggngcnaayggngaraarggngcnmgnggngtngcnggnaarccnggnccnmgnggncarmgnggnccnacnggnccnmgnggnwsnmgnggngcnmgnggnccnacnggnaarccnggnccnaarggnacnwsnggnggngayggnccnccnggnccnccnggngarmgnggnccncarggnccncarggnccngtnggnttyccnggnccnaarggnccnccnggnccnccnggnaargayggnytnccnggncayccnggncarmgnggngaracnggnttycarggnaaracnggnccnccnggnccnggnggngtngtnggnccncarggnccnacnggngaracnggnccnathggngarmgnggncayccnggnccnccnggnccnccnggngarcarggnytnccnggngcngcnggnaargarggngcnaarggngayccnggnccncarggnathwsnggnaargayggnccngcnggnytnmgnggnttyccnggngarmgnggnytnccnggngcncarggngcnccnggnytnaarggnggngarggnccncarggnccnccnggnccngtnggnwsnccnggngarmgnggnwsngcnggnacngcnggnccnathggnytnccnggnmgnccnggnccncarggnccnccnggnccngcnggngaraarggngcnccnggngaraarggnccncarggnccngcnggnmgngayggngtncarggnccngtnggnytnccnggnccngcnggnccngcnggnwsnccnggngargayggngayaarggngarathggngarccnggncaraarggnwsnaarggngayaarggngaraayggnccnccnggnccnccnggnytncarggnccngtnggngcnccnggnathgcnggnggngayggngarccnggnccnmgnggncarcarggnatgttyggncaraarggngaygarggngcnmgnggnttyccnggnccnccnggnccnathggnytncarggnytnccnggnccnccnggngaraarggngaraayggngaygtnggnccnatgggnccnccnggnccnccnggnccnmgnggnccncarggnccnaayggngcngayggnccncarggnccnccnggnwsngtnggnwsngtnggnggngtnggngaraarggngarccnggngargcnggnaayccnggnccnccnggngargcnggngtnggnggnccnaarggngarmgnggngaraarggngargcnggnccnccnggngcngcnggnccnccnggngcnaarggnccnccnggngaygayggnccnaarggnaayccnggnccngtnggnttyccnggngayccnggnccnccnggngarccnggnccngcnggncargayggngtnggnggngayaarggngargayggngayccnggncarccnggnccnccnggnccnwsnggngargcnggnccnccnggnccnccnggnaarmgnggnccnccnggngcngcnggngcngarggnmgncarggngaraarggngcnaarggngargcnggngcngarggnccnccnggnaaracnggnccngtnggnccncarggnccngcnggnaarccnggnccngarggnytnmgnggnathccnggnccngtnggngarcarggnytnccnggngcngcnggncargayggnccnccnggnccnatgggnccnccnggnytnccnggnytnaarggngayccnggnwsnaarggngaraarggncayccnggnytnathggnytnathggnccnccnggngarcarggngaraarggngaymgnggnytnccnggnacncarggnwsnccnggngcnaarggngayggnggnathccnggnccngcnggnccnytnggnccnccnggnccnccnggnytnccnggnccncarggnccnaarggnaayaarggnwsnacnggnccngcnggncaraarggngaywsnggnytnccnggnccnccnggnwsnccnggnccnccnggngargtn

SEQ ID NO: 1122 - DNA, 3042 bp, Artificial Sequence
  hCol-CNA27 (alpha2(XI) THD)
  misc_feature (3)..(3): n is a, c, g, or t
  misc_feature (6)..(6): n is a, c, g, or t
  misc_feature (9)..(9): n is a, c, g, or t
  misc_feature (12)..(12): n is a, c, g, or t
  misc_feature (15)..(15): n is a, c, g, or t
  misc_feature (21)..(21): n is a, c, g, or t
  misc_feature (27)..(27): n is a, c, g, or t
  misc_feature (30)..(30): n is a, c, g, or t
  misc_feature (33)..(33): n is a, c, g, or t
  misc_feature (36)..(36): n is a, c, g, or t
  misc_feature (39)..(39): n is a, c, g, or t
  misc_feature (42)..(42): n is a, c, g, or t
  misc_feature (45)..(45): n is a, c, g, or t
  misc_feature (48)..(48): n is a, c, g, or t
  misc_feature (54)..(54): n is a, c, g, or t
  misc_feature (57)..(57): n is a, c, g, or t
  misc_feature (60)..(60): n is a, c, g, or t
  misc_feature (63)..(63): n is a, c, g, or t
  misc_feature (66)..(66): n is a, c, g, or t
  misc_feature (69)..(69): n is a, c, g, or t
  misc_feature (75)..(75): n is a, c, g, or t
  misc_feature (81)..(81): n is a, c, g, or t
  misc_feature (84)..(84): n is a, c, g, or t
  misc_feature (90)..(90): n is a, c, g, or t
  misc_feature (93)..(93): n is a, c, g, or t
  misc_feature (96)..(96): n is a, c, g, or t
  misc_feature (102)..(102): n is a, c, g, or t
  misc_feature (105)..(105): n is a, c, g, or t
  misc_feature (108)..(108): n is a, c, g, or t
  misc_feature (111)..(111): n is a, c, g, or t
  misc_feature (114)..(114): n is a, c, g, or t
  misc_feature (120)..(120): n is a, c, g, or t
  misc_feature (123)..(123): n is a, c, g, or t
  misc_feature (126)..(126): n is a, c, g, or t
  misc_feature (129)..(129): n is a, c, g, or t
  misc_feature (132)..(132): n is a, c, g, or t
  misc_feature (135)..(135): n is a, c, g, or t
  misc_feature (138)..(138): n is a, c, g, or t
  misc_feature (144)..(144): n is a, c, g, or t
  misc_feature (147)..(147): n is a, c, g, or t
  misc_feature (150)..(150): n is a, c, g, or t
  misc_feature (153)..(153): n is a, c, g, or t
  misc_feature (156)..(156): n is a, c, g, or t
  misc_feature (159)..(159): n is a, c, g, or t
  misc_feature (162)..(162): n is a, c, g, or t
  misc_feature (165)..(165): n is a, c, g, or t
  misc_feature (168)..(168): n is a, c, g, or t
  misc_feature (174)..(174): n is a, c, g, or t
  misc_feature (177)..(177): n is a, c, g, or t
  misc_feature (180)..(180): n is a, c, g, or t
  misc_feature (183)..(183): n is a, c, g, or t
  misc_feature (189)..(189): n is a, c, g, or t
  misc_feature (192)..(192): n is a, c, g, or t
  misc_feature (198)..(198): n is a, c, g, or t
  misc_feature (201)..(201): n is a, c, g, or t
  misc_feature (204)..(204): n is a, c, g, or t
  misc_feature (210)..(210): n is a, c, g, or t
  misc_feature (216)..(216): n is a, c, g, or t
  misc_feature (219)..(219): n is a, c, g, or t
  misc_feature (228)..(228): n is a, c, g, or t
  misc_feature (231)..(231): n is a, c, g, or t
  misc_feature (234)..(234): n is a, c, g, or t
  misc_feature (237)..(237): n is a, c, g, or t
  misc_feature (240)..(240): n is a, c, g, or t
  misc_feature (243)..(243): n is a, c, g, or t
  misc_feature (246)..(246): n is a, c, g, or t
  misc_feature (255)..(255): n is a, c, g, or t
  misc_feature (261)..(261): n is a, c, g, or t
  misc_feature (264)..(264): n is a, c, g, or t
  misc_feature (270)..(270): n is a, c, g, or t
  misc_feature (273)..(273): n is a, c, g, or t
  misc_feature (276)..(276): n is a, c, g, or t
  misc_feature (282)..(282): n is a, c, g, or t
  misc_feature (285)..(285): n is a, c, g, or t
  misc_feature (288)..(288): n is a, c, g, or t
  misc_feature (291)..(291): n is a, c, g, or t
  misc_feature (294)..(294): n is a, c, g, or t
  misc_feature (297)..(297): n is a, c, g, or t
  misc_feature (300)..(300): n is a, c, g, or t
  misc_feature (309)..(309): n is a, c, g, or t
  misc_feature (315)..(315): n is a, c, g, or t
  misc_feature (318)..(318): n is a, c, g, or t
  misc_feature (327)..(327): n is a, c, g, or t
  misc_feature (336)..(336): n is a, c, g, or t
  misc_feature (339)..(339): n is a, c, g, or t
  misc_feature (342)..(342): n is a, c, g, or t
  misc_feature (345)..(345): n is a, c, g, or t
  misc_feature (348)..(348): n is a, c, g, or t
  misc_feature (351)..(351): n is a, c, g, or t
  misc_feature (354)..(354): n is a, c, g, or t
  misc_feature (360)..(360): n is a, c, g, or t
  misc_feature (363)..(363): n is a, c, g, or t
  misc_feature (366)..(366): n is a, c, g, or t
  misc_feature (369)..(369): n is a, c, g, or t
  misc_feature (372)..(372): n is a, c, g, or t
  misc_feature (375)..(375): n is a, c, g, or t
  misc_feature (378)..(378): n is a, c, g, or t
  misc_feature (381)..(381): n is a, c, g, or t
  misc_feature (384)..(384): n is a, c, g, or t
  misc_feature (390)..(390): n is a, c, g, or t
  misc_feature (393)..(393): n is a, c, g, or t
  misc_feature (396)..(396): n is a, c, g, or t
  misc_feature (399)..(399): n is a, c, g, or t
  misc_feature (405)..(405): n is a, c, g, or t
  misc_feature (408)..(408): n is a, c, g, or t
  misc_feature (411)..(411): n is a, c, g, or t
  misc_feature (414)..(414): n is a, c, g, or t
  misc_feature (417)..(417): n is a, c, g, or t
  misc_feature (420)..(420): n is a, c, g, or t
  misc_feature (423)..(423): n is a, c, g, or t
  misc_feature (426)..(426): n is a, c, g, or t
  misc_feature (435)..(435): n is a, c, g, or t
  misc_feature (438)..(438): n is a, c, g, or t
  misc_feature (444)..(444): n is a, c, g, or t
  misc_feature (447)..(447): n is a, c, g, or t
  misc_feature (453)..(453): n is a, c, g, or t
  misc_feature (456)..(456): n is a, c, g, or t
  misc_feature (459)..(459): n is a, c, g, or t
  misc_feature (462)..(462): n is a, c, g, or t
  misc_feature (465)..(465): n is a, c, g, or t
  misc_feature (471)..(471): n is a, c, g, or t
  misc_feature (477)..(477): n is a, c, g, or t
  misc_feature (480)..(480): n is a, c, g, or t
  misc_feature (483)..(483): n is a, c, g, or t
  misc_feature (486)..(486): n is a, c, g, or t
  misc_feature (489)..(489): n is a, c, g, or t
  misc_feature (498)..(498): n is a, c, g, or t
  misc_feature (501)..(501): n is a, c, g, or t
  misc_feature (504)..(504): n is a, c, g, or t
  misc_feature (507)..(507): n is a, c, g, or t
  misc_feature (510)..(510): n is a, c, g, or t
  misc_feature (516)..(516): n is a, c, g, or t
  misc_feature (519)..(519): n is a, c, g, or t
  misc_feature (522)..(522): n is a, c, g, or t
  misc_feature (525)..(525): n is a, c, g, or t
  misc_feature (528)..(528): n is a, c, g, or t
  misc_feature (534)..(534): n is a, c, g, or t
  misc_feature (537)..(537): n is a, c, g, or t
  misc_feature (543)..(543): n is a, c, g, or t
  misc_feature (546)..(546): n is a, c, g, or t
  misc_feature (552)..(552): n is a, c, g, or t
  misc_feature (561)..(561): n is a, c, g, or t
  misc_feature (564)..(564): n is a, c, g, or t
  misc_feature (570)..(570): n is a, c, g, or t
  misc_feature (576)..(576): n is a, c, g, or t
  misc_feature (579)..(579): n is a, c, g, or t
  misc_feature (582)..(582): n is a, c, g, or t
  misc_feature (585)..(585): n is a, c, g, or t
  misc_feature (588)..(588): n is a, c, g, or t
  misc_feature (594)..(594): n is a, c, g, or t
  misc_feature (597)..(597): n is a, c, g, or t
  misc_feature (600)..(600): n is a, c, g, or t
  misc_feature (606)..(606): n is a, c, g, or t
  misc_feature (609)..(609): n is a, c, g, or t
  misc_feature (612)..(612): n is a, c, g, or t
  misc_feature (615)..(615): n is a, c, g, or t
  misc_feature (621)..(621): n is a, c, g, or t
  misc_feature (624)..(624): n is a, c, g, or t
  misc_feature (633)..(633): n is a, c, g, or t
  misc_feature (636)..(636): n is a, c, g, or t
  misc_feature (639)..(639): n is a, c, g, or t
  misc_feature (642)..(642): n is a, c, g, or t
  misc_feature (645)..(645): n is a, c, g, or t
  misc_feature (651)..(651): n is a, c, g, or t
  misc_feature (660)..(660): n is a, c, g, or t
  misc_feature (663)..(663): n is a, c, g, or t
  misc_feature (666)..(666): n is a, c, g, or t
  misc_feature (669)..(669): n is a, c, g, or t
  misc_feature (672)..(672): n is a, c, g, or t
  misc_feature (678)..(678): n is a, c, g, or t
  misc_feature (681)..(681): n is a, c, g, or t
  misc_feature (684)..(684): n is a, c, g, or t
  misc_feature (687)..(687): n is a, c, g, or t
  misc_feature (693)..(693): n is a, c, g, or t
  misc_feature (696)..(696): n is a, c, g, or t
  misc_feature (699)..(699): n is a, c, g, or t
  misc_feature (702)..(702): n is a, c, g, or t
  misc_feature (705)..(705): n is a, c, g, or t
  misc_feature (708)..(708): n is a, c, g, or t
  misc_feature (714)..(714): n is a, c, g, or t
  misc_feature (717)..(717): n is a, c, g, or t
  misc_feature (723)..(723): n is a, c, g, or t
  misc_feature (729)..(729): n is a, c, g, or t
  misc_feature (732)..(732): n is a, c, g, or t
  misc_feature (735)..(735): n is a, c, g, or t
  misc_feature (741)..(741): n is a, c, g, or t
  misc_feature (750)..(750): n is a, c, g, or t
  misc_feature (759)..(759): n is a, c, g, or t
  misc_feature (768)..(768): n is a, c, g, or t
  misc_feature (774)..(774): n is a, c, g, or t
  misc_feature (777)..(777): n is a, c, g, or t
  misc_feature (786)..(786): n is a, c, g, or t
  misc_feature (795)..(795): n is a, c, g, or t
  misc_feature (798)..(798): n is a, c, g, or t
  misc_feature (804)..(804): n is a, c, g, or t
  misc_feature (810)..(810): n is a, c, g, or t
  misc_feature (813)..(813): n is a, c, g, or t
  misc_feature (819)..(819): n is a, c, g, or t
  misc_feature (822)..(822): n is a, c, g, or t
  misc_feature (825)..(825): n is a, c, g, or t
  misc_feature (828)..(828): n is a, c, g, or t
  misc_feature (831)..(831): n is a, c, g, or t
  misc_feature (834)..(834): n is a, c, g, or t
  misc_feature (837)..(837): n is a, c, g, or t
  misc_feature (840)..(840): n is a, c, g, or t
  misc_feature (849)..(849): n is a, c, g, or t
  misc_feature (852)..(852): n is a, c, g, or t
  misc_feature (858)..(858): n is a, c, g, or t
  misc_feature (861)..(861): n is a, c, g, or t
  misc_feature (867)..(867): n is a, c, g, or t
  misc_feature (870)..(870): n is a, c, g, or t
  misc_feature (873)..(873): n is a, c, g, or t
  misc_feature (876)..(876): n is a, c, g, or t
  misc_feature (879)..(879): n is a, c, g, or t
  misc_feature (882)..(882): n is a, c, g, or t
  misc_feature (885)..(885): n is a, c, g, or t
  misc_feature (891)..(891): n is a, c, g, or t
  misc_feature (894)..(894): n is a, c, g, or t
  misc_feature (897)..(897): n is a, c, g, or t
  misc_feature (900)..(900): n is a, c, g, or t
  misc_feature (903)..(903): n is a, c, g, or t
  misc_feature (906)..(906): n is a, c, g, or t
  misc_feature (912)..(912): n is a, c, g, or t
  misc_feature (921)..(921): n is a, c, g, or t
  misc_feature (927)..(927): n is a, c, g, or t
  misc_feature (930)..(930): n is a, c, g, or t
  misc_feature (933)..(933): n is a, c, g, or t
  misc_feature (936)..(936): n is a, c, g, or t
  misc_feature (939)..(939): n is a, c, g, or t
  misc_feature (942)..(942): n is a, c, g, or t
  misc_feature (945)..(945): n is a, c, g, or t
  misc_feature (948)..(948): n is a, c, g, or t
  misc_feature (954)..(954): n is a, c, g, or t
  misc_feature (957)..(957): n is a, c, g, or t
  misc_feature (960)..(960): n is a, c, g, or t
  misc_feature (966)..(966): n is a, c, g, or t
  misc_feature (969)..(969): n is a, c, g, or t
  misc_feature (975)..(975): n is a, c, g, or t
  misc_feature (978)..(978): n is a, c, g, or t
  misc_feature (981)..(981): n is a, c, g, or t
  misc_feature (984)..(984): n is a, c, g, or t
  misc_feature (990)..(990): n is a, c, g, or t
  misc_feature (993)..(993): n is a, c, g, or t
  misc_feature (999)..(999): n is a, c, g, or t
  misc_feature (1002)..(1002): n is a, c, g, or t
  misc_feature (1005)..(1005): n is a, c, g, or t
  misc_feature (1008)..(1008): n is a, c, g, or t
  misc_feature (1011)..(1011): n is a, c, g, or t
  misc_feature (1020)..(1020): n is a, c, g, or t
  misc_feature (1023)..(1023): n is a, c, g, or t
  misc_feature (1026)..(1026): n is a, c, g, or t
  misc_feature (1029)..(1029): n is a, c, g, or t
  misc_feature (1032)..(1032): n is a, c, g, or t
  misc_feature (1035)..(1035): n is a, c, g, or t
  misc_feature (1038)..(1038): n is a, c, g, or t
  misc_feature (1044)..(1044): n is a, c, g, or t
  misc_feature (1047)..(1047): n is a, c, g, or t
  misc_feature (1050)..(1050): n is a, c, g, or t
  misc_feature (1053)..(1053): n is a, c, g, or t
  misc_feature (1056)..(1056): n is a, c, g, or t
  misc_feature (1062)..(1062): n is a, c, g, or t
  misc_feature (1065)..(1065): n is a, c, g, or t
  misc_feature (1068)..(1068): n is a, c, g, or t
  misc_feature (1071)..(1071): n is a, c, g, or t
  misc_feature (1074)..(1074): n is a, c, g, or t
  misc_feature (1077)..(1077): n is a, c, g, or t
  misc_feature (1080)..(1080): n is a, c, g, or t
  misc_feature (1083)..(1083): n is a, c, g, or t
  misc_feature (1089)..(1089): n is a, c, g, or t
  misc_feature (1092)..(1092): n is a, c, g, or t
  misc_feature (1095)..(1095): n is a, c, g, or t
  misc_feature (1098)..(1098): n is a, c, g, or t
  misc_feature (1101)..(1101): n is a, c, g, or t
  misc_feature (1104)..(1104): n is a, c, g, or t
  misc_feature (1107)..(1107): n is a, c, g, or t
  misc_feature (1110)..(1110): n is a, c, g, or t
  misc_feature (1116)..(1116): n is a, c, g, or t
  misc_feature (1119)..(1119): n is a, c, g, or t
  misc_feature (1122)..(1122): n is a, c, g, or t
  misc_feature (1128)..(1128): n is a, c, g, or t
  misc_feature (1131)..(1131): n is a, c, g, or t
  misc_feature (1134)..(1134): n is a, c, g, or t
  misc_feature (1137)..(1137): n is a, c, g, or t
  misc_feature (1140)..(1140): n is a, c, g, or t
  misc_feature (1146)..(1146): n is a, c, g, or t
  misc_feature (1149)..(1149): n is a, c, g, or t
  misc_feature (1155)..(1155): n is a, c, g, or t
  misc_feature (1158)..(1158): n is a, c, g, or t
  misc_feature (1161)..(1161): n is a, c, g, or t
  misc_feature (1164)..(1164): n is a, c, g, or t
  misc_feature (1170)..(1170): n is a, c, g, or t
  misc_feature (1173)..(1173): n is a, c, g, or t
  misc_feature (1176)..(1176): n is a, c, g, or t
  misc_feature (1179)..(1179): n is a, c, g, or t
  misc_feature (1182)..(1182): n is a, c, g, or t
  misc_feature (1185)..(1185): n is a, c, g, or t
  misc_feature (1191)..(1191): n is a, c, g, or t
  misc_feature (1194)..(1194): n is a, c, g, or t
  misc_feature (1200)..(1200): n is a, c, g, or t
  misc_feature (1206)..(1206): n is a, c, g, or t
  misc_feature (1209)..(1209): n is a, c, g, or t
  misc_feature (1212)..(1212): n is a, c, g, or t
  misc_feature (1218)..(1218): n is a, c, g, or t
  misc_feature (1221)..(1221): n is a, c, g, or t
  misc_feature (1224)..(1224): n is a, c, g, or t
  misc_feature (1227)..(1227): n is a, c, g, or t
  misc_feature (1230)..(1230): n is a, c, g, or t
  misc_feature (1233)..(1233): n is a, c, g, or t
  misc_feature (1236)..(1236): n is a, c, g, or t
  misc_feature (1245)..(1245): n is a, c, g, or t
  misc_feature (1248)..(1248): n is a, c, g, or t
  misc_feature (1251)..(1251): n is a, c, g, or t
  misc_feature (1254)..(1254): n is a, c, g, or t
  misc_feature (1260)..(1260): n is a, c, g, or t
  misc_feature (1263)..(1263): n is a, c, g, or t
  misc_feature (1269)..(1269): n is a, c, g, or t
  misc_feature (1272)..(1272): n is a, c, g, or t
  misc_feature (1278)..(1278): n is a, c, g, or t
  misc_feature (1281)..(1281): n is a, c, g, or t
  misc_feature (1290)..(1290): n is a, c, g, or t
  misc_feature (1296)..(1296): n is a, c, g, or t
  misc_feature (1299)..(1299): n is a, c, g, or t
  misc_feature (1302)..(1302): n is a, c, g, or t
  misc_feature (1305)..(1305): n is a, c, g, or t
  misc_feature (1308)..(1308): n is a, c, g, or t
  misc_feature (1311)..(1311): n is a, c, g, or t
  misc_feature (1314)..(1314): n is a, c, g, or t
  misc_feature (1317)..(1317): n is a, c, g, or t
  misc_feature (1320)..(1320): n is a, c, g, or t
  misc_feature (1323)..(1323): n is a, c, g, or t
  misc_feature (1326)..(1326): n is a, c, g, or t
  misc_feature (1329)..(1329): n is a, c, g, or t
  misc_feature (1335)..(1335): n is a, c, g, or t
  misc_feature (1338)..(1338): n is a, c, g, or t
  misc_feature (1341)..(1341): n is a, c, g, or t
  misc_feature (1344)..(1344): n is a, c, g, or t
  misc_feature (1350)..(1350): n is a, c, g, or t
  misc_feature (1353)..(1353): n is a, c, g, or t
  misc_feature (1356)..(1356): n is a, c, g, or t
  misc_feature (1362)..(1362): n is a, c, g, or t
  misc_feature (1368)..(1368): n is a, c, g, or t
  misc_feature (1371)..(1371): n is a, c, g, or t
  misc_feature (1377)..(1377): n is a, c, g, or t
  misc_feature (1380)..(1380): n is a, c, g, or t
  misc_feature (1383)..(1383): n is a, c, g, or t
  misc_feature (1386)..(1386): n is a, c, g, or t
  misc_feature (1389)..(1389): n is a, c, g, or t
  misc_feature (1392)..(1392): n is a, c, g, or t
  misc_feature (1395)..(1395): n is a, c, g, or t
  misc_feature (1398)..(1398): n is a, c, g, or t
  misc_feature (1407)..(1407): n is a, c, g, or t
  misc_feature (1410)..(1410): n is a, c, g, or t
  misc_feature (1413)..(1413): n is a, c, g, or t
  misc_feature (1416)..(1416): n is a, c, g, or t
  misc_feature (1419)..(1419): n is a, c, g, or t
  misc_feature (1422)..(1422): n is a, c, g, or t
  misc_feature (1425)..(1425): n is a, c, g, or t
  misc_feature (1434)..(1434): n is a, c, g, or t
  misc_feature (1437)..(1437): n is a, c, g, or t
  misc_feature (1443)..(1443): n is a, c, g, or t
  misc_feature (1449)..(1449): n is a, c, g, or t
  misc_feature (1452)..(1452): n is a, c, g, or t
  misc_feature (1455)..(1455): n is a, c, g, or t
  misc_feature (1458)..(1458): n is a, c, g, or t
  misc_feature (1461)..(1461): n is a, c, g, or t
  misc_feature (1464)..(1464): n is a, c, g, or t
  misc_feature (1467)..(1467): n is a, c, g, or t
  misc_feature (1470)..(1470): n is a, c, g, or t
  misc_feature (1479)..(1479): n is a, c, g, or t
  misc_feature (1482)..(1482): n is a, c, g, or t
  misc_feature (1485)..(1485): n is a, c, g, or t
  misc_feature (1488)..(1488): n is a, c, g, or t
  misc_feature (1491)..(1491): n is a, c, g, or t
  misc_feature (1494)..(1494): n is a, c, g, or t
  misc_feature (1497)..(1497): n is a, c, g, or t
  misc_feature (1503)..(1503): n is a, c, g, or t
  misc_feature (1506)..(1506): n is a, c, g, or t
  misc_feature (1512)..(1512): n is a, c, g, or t
  misc_feature (1515)..(1515): n is a, c, g, or t
  misc_feature (1518)..(1518): n is a, c, g, or t
  misc_feature (1521)..(1521): n is a, c, g, or t
  misc_feature (1524)..(1524): n is a, c, g, or t
  misc_feature (1527)..(1527): n is a, c, g, or t
  misc_feature (1530)..(1530): n is a, c, g, or t
  misc_feature (1533)..(1533): n is a, c, g, or t
  misc_feature (1536)..(1536): n is a, c, g, or t
  misc_feature (1539)..(1539): n is a, c, g, or t
  misc_feature (1542)..(1542): n is a, c, g, or t
  misc_feature (1545)..(1545): n is a, c, g, or t
  misc_feature (1551)..(1551): n is a, c, g, or t
  misc_feature (1560)..(1560): n is a, c, g, or t
  misc_feature (1563)..(1563): n is a, c, g, or t
  misc_feature (1566)..(1566): n is a, c, g, or t
  misc_feature (1569)..(1569): n is a, c, g, or t
  misc_feature (1572)..(1572): n is a, c, g, or t
  misc_feature (1575)..(1575): n is a, c, g, or t
  misc_feature (1578)..(1578): n is a, c, g, or t
  misc_feature (1581)..(1581): n is a, c, g, or t
  misc_feature (1584)..(1584): n is a, c, g, or t
  misc_feature (1587)..(1587): n is a, c, g, or t
  misc_feature (1590)..(1590): n is a, c, g, or t
  misc_feature (1593)..(1593): n is a, c, g, or t
  misc_feature (1596)..(1596): n is a, c, g, or t
  misc_feature (1602)..(1602): n is a, c, g, or t
  misc_feature (1605)..(1605): n is a, c, g, or t
  misc_feature (1608)..(1608): n is a, c, g, or t
  misc_feature (1611)..(1611): n is a, c, g, or t
  misc_feature (1614)..(1614): n is a, c, g, or t
  misc_feature (1617)..(1617): n is a, c, g, or t
  misc_feature (1620)..(1620): n is a, c, g, or t
  misc_feature (1623)..(1623): n is a, c, g, or t
  misc_feature (1626)..(1626): n is a, c, g, or t
  misc_feature (1632)..(1632): n is a, c, g, or t
  misc_feature (1635)..(1635): n is a, c, g, or t
  misc_feature (1638)..(1638): n is a, c, g, or t
  misc_feature (1641)..(1641): n is a, c, g, or t
  misc_feature (1644)..(1644): n is a, c, g, or t
  misc_feature (1647)..(1647): n is a, c, g, or t
  misc_feature (1650)..(1650): n is a, c, g, or t
  misc_feature (1653)..(1653): n is a, c, g, or t
  misc_feature (1659)..(1659): n is a, c, g, or t
  misc_feature (1662)..(1662): n is a, c, g, or t
  misc_feature (1665)..(1665): n is a, c, g, or t
  misc_feature (1668)..(1668): n is a, c, g, or t
  misc_feature (1671)..(1671): n is a, c, g, or t
  misc_feature (1674)..(1674): n is a, c, g, or t
  misc_feature (1677)..(1677): n is a, c, g, or t
  misc_feature (1686)..(1686): n is a, c, g, or t
  misc_feature (1689)..(1689): n is a, c, g, or t
  misc_feature (1692)..(1692): n is a, c, g, or t
  misc_feature (1695)..(1695): n is a, c, g, or t
  misc_feature (1704)..(1704): n is a, c, g, or t
  misc_feature (1707)..(1707): n is a, c, g, or t
  misc_feature (1713)..(1713): n is a, c, g, or t
  misc_feature (1716)..(1716): n is a, c, g, or t
  misc_feature (1719)..(1719): n is a, c, g, or t
  misc_feature (1722)..(1722): n is a, c, g, or t
  misc_feature (1725)..(1725): n is a, c, g, or t
  misc_feature (1731)..(1731): n is a, c, g, or t
  misc_feature (1734)..(1734): n is a, c, g, or t
  misc_feature (1740)..(1740): n is a, c, g, or t
  misc_feature (1743)..(1743): n is a, c, g, or t
  misc_feature (1746)..(1746): n is a, c, g, or t
  misc_feature (1749)..(1749): n is a, c, g, or t
  misc_feature (1752)..(1752): n is a, c, g, or t
  misc_feature (1755)..(1755): n is a, c, g, or t
  misc_feature (1758)..(1758): n is a, c, g, or t
  misc_feature (1761)..(1761): n is a, c, g, or t
  misc_feature (1764)..(1764): n is a, c, g, or t
  misc_feature (1767)..(1767): n is a, c, g, or t
  misc_feature (1770)..(1770): n is a, c, g, or t
  misc_feature (1773)..(1773): n is a, c, g, or t
  misc_feature (1776)..(1776): n is a, c, g, or t
  misc_feature (1779)..(1779): n is a, c, g, or t
  misc_feature (1782)..(1782): n is a, c, g, or t
  misc_feature (1785)..(1785): n is a, c, g, or t
  misc_feature (1794)..(1794): n is a, c, g, or t
  misc_feature (1803)..(1803): n is a, c, g, or t
  misc_feature (1809)..(1809): n is a, c, g, or t
  misc_feature (1812)..(1812): n is a, c, g, or t
  misc_feature (1818)..(1818): n is a, c, g, or t
  misc_feature (1821)..(1821): n is a, c, g, or t
  misc_feature (1830)..(1830): n is a, c, g, or t
  misc_feature (1833)..(1833): n is a, c, g, or t
  misc_feature (1839)..(1839): n is a, c, g, or t
  misc_feature (1848)..(1848): n is a, c, g, or t
  misc_feature (1857)..(1857): n is a, c, g, or t
  misc_feature (1860)..(1860): n is a, c, g, or t
  misc_feature (1863)..(1863): n is a, c, g, or t
  misc_feature (1866)..(1866): n is a, c, g, or t
  misc_feature (1869)..(1869): n is a, c, g, or t
  misc_feature (1872)..(1872): n is a, c, g, or t
  misc_feature (1875)..(1875): n is a, c, g, or t
  misc_feature (1878)..(1878): n is a, c, g, or t
  misc_feature (1884)..(1884): n is a, c, g, or t
  misc_feature (1887)..(1887): n is a, c, g, or t
  misc_feature (1890)..(1890): n is a, c, g, or t
  misc_feature (1893)..(1893): n is a, c, g, or t
  misc_feature (1899)..(1899): n is a, c, g, or t
  misc_feature (1902)..(1902): n is a, c, g, or t
  misc_feature (1905)..(1905): n is a, c, g, or t
  misc_feature (1908)..(1908): n is a, c, g, or t
  misc_feature (1911)..(1911): n is a, c, g, or t
  misc_feature (1914)..(1914): n is a, c, g, or t
  misc_feature (1920)..(1920): n is a, c, g, or t
  misc_feature (1926)..(1926): n is a, c, g, or t
  misc_feature (1929)..(1929): n is a, c, g, or t
  misc_feature (1932)..(1932): n is a, c, g, or t
  misc_feature (1935)..(1935): n is a, c, g, or t
  misc_feature (1938)..(1938): n is a, c, g, or t
  misc_feature (1941)..(1941): n is a, c, g, or t
  misc_feature (1947)..(1947): n is a, c, g, or t
  misc_feature (1956)..(1956): n is a, c, g, or t
  misc_feature (1959)..(1959): n is a, c, g, or t
  misc_feature (1965)..(1965): n is a, c, g, or t
  misc_feature (1974)..(1974): n is a, c, g, or t
  misc_feature (1977)..(1977): n is a, c, g, or t
  misc_feature (1980)..(1980): n is a, c, g, or t
  misc_feature (1983)..(1983): n is a, c, g, or t
  misc_feature (1992)..(1992): n is a, c, g, or t
  misc_feature (1995)..(1995): n is a, c, g, or t
  misc_feature (1998)..(1998): n is a, c, g, or t
  misc_feature (2001)..(2001): n is a, c, g, or t
  misc_feature (2004)..(2004): n is a, c, g, or t
  misc_feature (2010)..(2010): n is a, c, g, or t
  misc_feature (2013)..(2013): n is a, c, g, or t
  misc_feature (2019)..(2019): n is a, c, g, or t
  misc_feature (2022)..(2022): n is a, c, g, or t
  misc_feature (2025)..(2025): n is a, c, g, or t
  misc_feature (2028)..(2028): n is a, c, g, or t
  misc_feature (2031)..(2031): n is a, c, g, or t
  misc_feature (2034)..(2034): n is a, c, g, or t
  misc_feature (2037)..(2037): n is a, c, g, or t
  misc_feature (2046)..(2046): n is a, c, g, or t
  misc_feature (2052)..(2052): n is a, c, g, or t
  misc_feature (2055)..(2055): n is a, c, g, or t
  misc_feature (2061)..(2061): n is a, c, g, or t
  misc_feature (2064)..(2064): n is a, c, g, or t
  misc_feature (2067)..(2067): n is a, c, g, or t
  misc_feature (2073)..(2073): n is a, c, g, or t
  misc_feature (2076)..(2076): n is a, c, g, or t
  misc_feature (2079)..(2079): n is a, c, g, or t
  misc_feature (2082)..(2082): n is a, c, g, or t
  misc_feature (2085)..(2085): n is a, c, g, or t
  misc_feature (2088)..(2088): n is a, c, g, or t
  misc_feature (2091)..(2091): n is a, c, g, or t
  misc_feature (2094)..(2094): n is a, c, g, or t
  misc_feature (2097)..(2097): n is a, c, g, or t
  misc_feature (2100)..(2100): n is a, c, g, or t
  misc_feature (2103)..(2103): n is a, c, g, or t
  misc_feature (2106)..(2106): n is a, c, g, or t
  misc_feature (2109)..(2109): n is a, c, g, or t
  misc_feature (2112)..(2112): n is a, c, g, or t
  misc_feature (2118)..(2118): n is a, c, g, or t
  misc_feature (2121)..(2121): n is a, c, g, or t
  misc_feature (2127)..(2127): n is a, c, g, or t
  misc_feature (2130)..(2130): n is a, c, g, or t
  misc_feature (2136)..(2136): n is a, c, g, or t
  misc_feature (2139)..(2139): n is a, c, g, or t
  misc_feature (2142)..(2142): n is a, c, g, or t
  misc_feature (2145)..(2145): n is a, c, g, or t
  misc_feature (2148)..(2148): n is a, c, g, or t
  misc_feature (2151)..(2151): n is a, c, g, or t
  misc_feature (2154)..(2154): n is a, c, g, or t
  misc_feature (2160)..(2160): n is a, c, g, or t
  misc_feature (2163)..(2163): n is a, c, g, or t
  misc_feature (2166)..(2166): n is a, c, g, or t
  misc_feature (2169)..(2169): n is a, c, g, or t
  misc_feature (2172)..(2172): n is a, c, g, or t
  misc_feature (2181)..(2181): n is a, c, g, or t
  misc_feature (2187)..(2187): n is a, c, g, or t
  misc_feature (2190)..(2190): n is a, c, g, or t
  misc_feature (2196)..(2196): n is a, c, g, or t
  misc_feature (2199)..(2199): n is a, c, g, or t
  misc_feature (2202)..(2202): n is a, c, g, or t
  misc_feature (2205)..(2205): n is a, c, g, or t
  misc_feature (2208)..(2208): n is a, c, g, or t
  misc_feature (2217)..(2217): n is a, c, g, or t
  misc_feature (2223)..(2223): n is a, c, g, or t
  misc_feature (2226)..(2226): n is a, c, g, or t
  misc_feature (2229)..(2229): n is a, c, g, or t
  misc_feature (2235)..(2235): n is a, c, g, or t
  misc_feature (2238)..(2238): n is a, c, g, or t
  misc_feature (2241)..(2241): n is a, c, g, or t
  misc_feature (2244)..(2244): n is a, c, g, or t
  misc_feature (2250)..(2250): n is a, c, g, or t
  misc_feature (2253)..(2253): n is a, c, g, or t
  misc_feature (2262)..(2262): n is a, c, g, or t
  misc_feature (2268)..(2268): n is a, c, g, or t
  misc_feature (2271)..(2271): n is a, c, g, or t
  misc_feature (2277)..(2277): n is a, c, g, or t
  misc_feature (2280)..(2280): n is a, c, g, or t
  misc_feature (2286)..(2286): n is a, c, g, or t
  misc_feature (2289)..(2289): n is a, c, g, or t
  misc_feature (2292)..(2292): n is a, c, g, or t
  misc_feature (2295)..(2295): n is a, c, g, or t
  misc_feature (2298)..(2298): n is a, c, g, or t
  misc_feature (2301)..(2301): n is a, c, g, or t
  misc_feature (2307)..(2307): n is a, c, g, or t
  misc_feature (2310)..(2310): n is a, c, g, or t
  misc_feature (2313)..(2313): n is a, c, g, or t
  misc_feature (2316)..(2316): n is a, c, g, or t
  misc_feature (2325)..(2325): n is a, c, g, or t
  misc_feature (2328)..(2328): n is a, c, g, or t
  misc_feature (2334)..(2334): n is a, c, g, or t
  misc_feature (2340)..(2340): n is a, c, g, or t
  misc_feature (2343)..(2343): n is a, c, g, or t
  misc_feature (2346)..(2346): n is a, c, g, or t
  misc_feature (2349)..(2349): n is a, c, g, or t
  misc_feature (2352)..(2352): n is a, c, g, or t
  misc_feature (2358)..(2358): n is a, c, g, or t
  misc_feature (2361)..(2361): n is a, c, g, or t
  misc_feature (2367)..(2367): n is a, c, g, or t
  misc_feature (2370)..(2370): n is a, c, g, or t
  misc_feature (2373)..(2373): n is a, c, g, or t
  misc_feature (2376)..(2376): n is a, c, g, or t
  misc_feature (2379)..(2379): n is a, c, g, or t
  misc_feature (2385)..(2385): n is a, c, g, or t
  misc_feature (2388)..(2388): n is a, c, g, or t
  misc_feature (2391)..(2391): n is a, c, g, or t
  misc_feature (2394)..(2394): n is a, c, g, or t
  misc_feature (2397)..(2397): n is a, c, g, or t
  misc_feature (2406)..(2406): n is a, c, g, or t
  misc_feature (2409)..(2409): n is a, c, g, or t
  misc_feature (2415)..(2415): n is a, c, g, or t
  misc_feature (2421)..(2421): n is a, c, g, or t
  misc_feature (2424)..(2424): n is a, c, g, or t
  misc_feature (2433)..(2433): n is a, c, g, or t
  misc_feature (2439)..(2439): n is a, c, g, or t
  misc_feature (2442)..(2442): n is a, c, g, or t
  misc_feature (2448)..(2448): n is a, c, g, or t
  misc_feature (2451)..(2451): n is a, c, g, or t
  misc_feature (2454)..(2454): n is a, c, g, or t
  misc_feature (2457)..(2457): n is a, c, g, or t
  misc_feature (2460)..(2460): n is a, c, g, or t
  misc_feature (2463)..(2463): n is a, c, g, or t
  misc_feature (2466)..(2466): n is a, c, g, or t
  misc_feature (2469)..(2469): n is a, c, g, or t
  misc_feature (2478)..(2478): n is a, c, g, or t
  misc_feature (2481)..(2481): n is a, c, g, or t
  misc_feature (2484)..(2484): n is a, c, g, or t
  misc_feature (2487)..(2487): n is a, c, g, or t
  misc_feature (2490)..(2490): n is a, c, g, or t
  misc_feature (2493)..(2493): n is a, c, g, or t
  misc_feature (2496)..(2496): n is a, c, g, or t
  misc_feature (2502)..(2502): n is a, c, g, or t
  misc_feature (2505)..(2505): n is a, c, g, or t
  misc_feature (2508)..(2508): n is a, c, g, or t
  misc_feature (2511)..(2511): n is a, c, g, or t
  misc_feature (2514)..(2514): n is a, c, g, or t
  misc_feature (2517)..(2517): n is a, c, g, or t
  misc_feature (2520)..(2520): n is a, c, g, or t
  misc_feature (2523)..(2523): n is a, c, g, or t
  misc_feature (2526)..(2526): n is a, c, g, or t
  misc_feature (2532)..(2532): n is a, c, g, or t
  misc_feature (2535)..(2535): n is a, c, g, or t
  misc_feature (2541)..(2541): n is a, c, g, or t
  misc_feature (2544)..(2544): n is a, c, g, or t
  misc_feature (2550)..(2550): n is a, c, g, or t
  misc_feature (2553)..(2553): n is a, c, g, or t
  misc_feature (2559)..(2559): n is a, c, g, or t
  misc_feature (2565)..(2565): n is a, c, g, or t
  misc_feature (2568)..(2568): n is a, c, g, or t
  misc_feature (2571)..(2571): n is a, c, g, or t
  misc_feature (2577)..(2577): n is a, c, g, or t
  misc_feature (2580)..(2580): n is a, c, g, or t
  misc_feature (2583)..(2583): n is a, c, g, or t
  misc_feature (2586)..(2586): n is a, c, g, or t
  misc_feature (2592)..(2592): n is a, c, g, or t
  misc_feature (2595)..(2595): n is a, c, g, or t
  misc_feature (2598)..(2598): n is a, c, g, or t
  misc_feature (2601)..(2601): n is a, c, g, or t
  misc_feature (2604)..(2604): n is a, c, g, or t
  misc_feature (2607)..(2607): n is a, c, g, or t
  misc_feature (2610)..(2610): n is a, c, g, or t
  misc_feature (2613)..(2613): n is a, c, g, or t
  misc_feature (2616)..(2616): n is a, c, g, or t
  misc_feature (2619)..(2619): n is a, c, g, or t
  misc_feature (2622)..(2622): n is a, c, g, or t
  misc_feature (2628)..(2628): n is a, c, g, or t
  misc_feature (2631)..(2631): n is a, c, g, or t
  misc_feature (2634)..(2634): n is a, c, g, or t
  misc_feature (2640)..(2640): n is a, c, g, or t
  misc_feature (2643)..(2643): n is a, c, g, or t
  misc_feature (2646)..(2646): n is a, c, g, or t
  misc_feature (2649)..(2649): n is a, c, g, or t
  misc_feature (2652)..(2652): n is a, c, g, or t
  misc_feature (2655)..(2655): n is a, c, g, or t
  misc_feature (2658)..(2658): n is a, c, g, or t
  misc_feature (2661)..(2661): n is a, c, g, or t
  misc_feature (2664)..(2664): n is a, c, g, or t
  misc_feature (2667)..(2667): n is a, c, g, or t
  misc_feature (2676)..(2676): n is a, c, g, or t
  misc_feature (2679)..(2679): n is a, c, g, or t
  misc_feature (2682)..(2682): n is a, c, g, or t
  misc_feature (2685)..(2685): n is a, c, g, or t
  misc_feature (2688)..(2688): n is a, c, g, or t
  misc_feature (2691)..(2691): n is a, c, g, or t
  misc_feature (2694)..(2694): n is a, c, g, or t
  misc_feature (2700)..(2700): n is a, c, g, or t
  misc_feature (2703)..(2703): n is a, c, g, or t
  misc_feature (2706)..(2706): n is a, c, g, or t
  misc_feature (2709)..(2709): n is a, c, g, or t
  misc_feature (2712)..(2712): n is a, c, g, or t
  misc_feature (2715)..(2715): n is a, c, g, or t
  misc_feature (2718)..(2718): n is a, c, g, or t
  misc_feature (2721)..(2721): n is a, c, g, or t
  misc_feature (2724)..(2724): n is a, c, g, or t
  misc_feature (2727)..(2727): n is a, c, g, or t
  misc_feature (2730)..(2730): n is a, c, g, or t
  misc_feature (2733)..(2733): n is a, c, g, or t
  misc_feature (2736)..(2736): n is a, c, g, or t
  misc_feature (2739)..(2739): n is a, c, g, or t
  misc_feature (2742)..(2742): n is a, c, g, or t
  misc_feature (2745)..(2745): n is a, c, g, or t
  misc_feature (2748)..(2748): n is a, c, g, or t
  misc_feature (2754)..(2754): n is a, c, g, or t
  misc_feature (2757)..(2757): n is a, c, g, or t
  misc_feature (2760)..(2760): n is a, c, g, or t
  misc_feature (2766)..(2766): n is a, c, g, or t
  misc_feature (2775)..(2775): n is a, c, g, or t
  misc_feature (2781)..(2781): n is a, c, g, or t
  misc_feature (2784)..(2784): n is a, c, g, or t
  misc_feature (2787)..(2787): n is a, c, g, or t
  misc_feature (2793)..(2793): n is a, c, g, or t
  misc_feature (2796)..(2796): n is a, c, g, or t
  misc_feature (2802)..(2802): n is a, c, g, or t
  misc_feature (2805)..(2805): n is a, c, g, or t
  misc_feature (2808)..(2808): n is a, c, g, or t
  misc_feature (2811)..(2811): n is a, c, g, or t
  misc_feature (2820)..(2820): n is a, c, g, or t
  misc_feature (2829)..(2829): n is a, c, g, or t
  misc_feature (2835)..(2835): n is a, c, g, or t
  misc_feature (2838)..(2838): n is a, c, g, or t
  misc_feature (2841)..(2841): n is a, c, g, or t
  misc_feature (2844)..(2844): n is a, c, g, or t
  misc_feature (2847)..(2847): n is a, c, g, or t
  misc_feature (2850)..(2850): n is a, c, g, or t
  misc_feature (2856)..(2856): n is a, c, g, or t
  misc_feature (2859)..(2859): n is a, c, g, or t
  misc_feature (2862)..(2862): n is a, c, g, or t
  misc_feature (2865)..(2865): n is a, c, g, or t
  misc_feature (2874)..(2874): n is a, c, g, or t
  misc_feature (2883)..(2883): n is a, c, g, or t
  misc_feature (2889)..(2889): n is a, c, g, or t
  misc_feature (2892)..(2892): n is a, c, g, or t
  misc_feature (2895)..(2895): n is a, c, g, or t
  misc_feature (2898)..(2898): n is a, c, g, or t
  misc_feature (2901)..(2901): n is a, c, g, or t
  misc_feature (2904)..(2904): n is a, c, g, or t
  misc_feature (2910)..(2910): n is a, c, g, or t
  misc_feature (2913)..(2913): n is a, c, g, or t
  misc_feature (2916)..(2916): n is a, c, g, or t
  misc_feature (2919)..(2919): n is a, c, g, or t
  misc_feature (2922)..(2922): n is a, c, g, or t
  misc_feature (2925)..(2925): n is a, c, g, or t
  misc_feature (2928)..(2928): n is a, c, g, or t
  misc_feature (2931)..(2931): n is a, c, g, or t
  misc_feature (2934)..(2934): n is a, c, g, or t
  misc_feature (2937)..(2937): n is a, c, g, or t
  misc_feature (2940)..(2940): n is a, c, g, or t
  misc_feature (2943)..(2943): n is a, c, g, or t
  misc_feature (2946)..(2946): n is a, c, g, or t
  misc_feature (2949)..(2949): n is a, c, g, or t
  misc_feature (2955)..(2955): n is a, c, g, or t
  misc_feature (2958)..(2958): n is a, c, g, or t
  misc_feature (2964)..(2964): n is a, c, g, or t
  misc_feature (2967)..(2967): n is a, c, g, or t
  misc_feature (2970)..(2970): n is a, c, g, or t
  misc_feature (2973)..(2973): n is a, c, g, or t
  misc_feature (2976)..(2976): n is a, c, g, or t
  misc_feature (2979)..(2979): n is a, c, g, or t
  misc_feature (2982)..(2982): n is a, c, g, or t
  misc_feature (2985)..(2985): n is a, c, g, or t
  misc_feature (2991)..(2991): n is a, c, g, or t
  misc_feature (3000)..(3000): n is a, c, g, or t
  misc_feature (3003)..(3003): n is a, c, g, or t
  misc_feature (3009)..(3009): n is a, c, g, or t
  misc_feature (3012)..(3012): n is a, c, g, or t
  misc_feature (3015)..(3015): n is a, c, g, or t
  misc_feature (3018)..(3018): n is a, c, g, or t
  misc_feature (3024)..(3024): n is a, c, g, or t
  misc_feature (3027)..(3027): n is a, c, g, or t
  misc_feature (3030)..(3030): n is a, c, g, or t
  misc_feature (3033)..(3033): n is a, c, g, or t
  misc_feature (3036)..(3036): n is a, c, g, or t
  misc_feature (3042)..(3042): n is a, c, g, or t
ggnccnccnggnccnatgggntayacnggnmgnccnggnccnytnggncarccnggnwsnccnggnytnaarggngarwsnggngayytnggnccncarggnccnmgnggnccncarggnytnacnggnccnccnggnaargcnggnmgnmgnggnmgngcnggngcngayggngcnmgnggnatgccnggngayccnggngtnaarggngaymgnggnttygayggnytnccnggnytnccnggngaraarggncaymgnggngayacnggngcncarggnytnccnggnccnccnggngargayggngarmgnggngaygayggngarathggnccnmgnggnytnccnggngarwsnggnccnmgnggnytnytnggnccnaarggnccnccnggnathccnggnccnccnggngtnmgnggnatggayggnccncarggnccnaarggnwsnytnggnccncarggngarccnggnccnccnggncarcarggnacnccnggnacncarggnytnccnggnccncarggngcnathggnccncayggngaraarggnccncarggnaarccnggnytnccnggnatgccnggnwsngayggnccnccnggncayccnggnaargarggnccnccnggnacnaarggnaaycarggnccnwsnggnccncarggnccnytnggntayccnggnccnmgnggngtnaarggngtngayggnathmgnggnytnaarggncayaarggngaraarggngargayggnttyccnggnttyaarggngayathggngtnaarggngaymgnggngargtnggngtnccnggnwsnmgnggngargayggnccngarggnccnaarggnmgnacnggnccnacnggngayccnggnccnccnggnytnatgggngaraarggnaarytnggngtnccnggnytnccnggntayccnggnmgncarggnccnaarggnwsnytnggnttyccnggnttyccnggngcnwsnggngaraarggngcnmgnggnytnwsnggnaarwsnggnccnmgnggngarmgnggnccnacnggnccnmgnggncarmgnggnccnmgnggngcnacnggnaarwsnggngcnaarggnacnwsnggnggngayggnccncayggnccnccnggngarmgnggnytnccnggnccncarggnccnaayggnttyccnggnccnaarggnccnccnggnccnccnggnaargayggnytnccnggncayccnggncarmgnggngargtnggnttycarggnaaracnggnccnccnggnccnccnggngtngtnggnccncarggngcngcnggngaracnggnccnatgggngarmgnggncayccnggnccnccnggnccnccnggngarcarggnytnccnggnacngcnggnaargarggnacnaarggngayccnggnccnccnggngcnccnggnaargayggnccngcnggnytnmgnggnttyccnggngarmgnggnytnccnggnacngcnggnggnccnggnytnaarggnaaygarggnccnwsnggnccnccnggnccngcnggnwsnccnggngarmgnggngcngcnggnwsnggnggnccnathggnccnccnggnmgnccnggnccncarggnccnccnggngcngcnggngaraarggngtnccnggngaraarggnccnathggnccnacnggnmgngayggngtncarggnccngtnggnytnccnggnccngcnggnccnccnggngtngcnggngargayggngayaarggngargtnggngayccnggncaraarggnacnaarggnaayaarggngarcayggnccnccnggnccnccnggnccnathggnccngtnggncarccnggngcngcnggngcngayggngarccnggngcnmgnggnccncarggncayttyggngcnaarggngaygarggnacnmgnggnttyaayggnccnccnggnccnathggnytncarggnytnccnggnccnwsnggngaraarggngaracnggngaygtnggnccnatgggnccnccnggnccnccnggnccnmgnggnccngcnggnccnaayggngcngayggnccncarggnccnccnggnggngtnggnaayytnggnccnccnggngaraarggngarccnggngarwsnggnwsnccnggnathcarggngarccnggngtnaarggnccnmgnggngarmgnggngaraarggngarwsnggncarccnggngarccnggnccnccnggnccnaarggnccnacnggngaygayggnccnaarggnaayccnggnccngtnggnttyccnggngayccnggnccnccnggngarggnggnccnmgnggncargayggngcnaarggngaymgnggngargayggngarccnggncarccnggnwsnccnggnccnacnggngaraayggnccnccnggnccnytnggnaarmgnggnccngcnggnwsnccnggnwsngarggnmgncarggnggnaarggngcnaarggngayccnggngcnathggngcnccnggnaaracnggnccngtnggnccngcnggnccngcnggnaarccnggnccngayggnytnmgnggnytnccnggnwsngtnggncarcarggnmgnccnggngcnacnggncargcnggnccnccnggnccngtnggnccnccnggnytnccnggnytnmgnggngaygcnggngcnaarggngaraarggncayccnggnytnathggnytnathggnccnccnggngarcarggngaraarggngaymgnggnytnccnggnccncarggnwsnccnggncaraarggngaratgggnathccnggngcnwsnggnccnathggnccnggnggnccnccnggnytnccnggnccngcnggnccnaarggngcnaarggngcnacnggnccnggnggnccnaarggngaraarggngtncarggnccnccnggncayccnggnccnccnggngargtn

SEQ ID NO: 1123 - DNA, 456 bp, Artificial Sequence
  hCol-CNA28 (alpha1(XII) THD1)
  misc_feature (3)..(3): n is a, c, g, or t
  misc_feature (6)..(6): n is a, c, g, or t
  misc_feature (9)..(9): n is a, c, g, or t
  misc_feature (12)..(12): n is a, c, g, or t
  misc_feature (15)..(15): n is a, c, g, or t
  misc_feature (18)..(18): n is a, c, g, or t
  misc_feature (21)..(21): n is a, c, g, or t
  misc_feature (24)..(24): n is a, c, g, or t
  misc_feature (27)..(27): n is a, c, g, or t
  misc_feature (30)..(30): n is a, c, g, or t
  misc_feature (33)..(33): n is a, c, g, or t
  misc_feature (36)..(36): n is a, c, g, or t
  misc_feature (39)..(39): n is a, c, g, or t
  misc_feature (42)..(42): n is a, c, g, or t
  misc_feature (48)..(48): n is a, c, g, or t
  misc_feature (51)..(51): n is a, c, g, or t
  misc_feature (54)..(54): n is a, c, g, or t
  misc_feature (57)..(57): n is a, c, g, or t
  misc_feature (63)..(63): n is a, c, g, or t
  misc_feature (66)..(66): n is a, c, g, or t
  misc_feature (72)..(72): n is a, c, g, or t
  misc_feature (75)..(75): n is a, c, g, or t
  misc_feature (78)..(78): n is a, c, g, or t
  misc_feature (84)..(84): n is a, c, g, or t
  misc_feature (87)..(87): n is a, c, g, or t
  misc_feature (90)..(90): n is a, c, g, or t
  misc_feature (93)..(93): n is a, c, g, or t
  misc_feature (96)..(96): n is a, c, g, or t
  misc_feature (99)..(99): n is a, c, g, or t
  misc_feature (102)..(102): n is a, c, g, or t
  misc_feature (111)..(111): n is a, c, g, or t
  misc_feature (114)..(114): n is a, c, g, or t
  misc_feature (117)..(117): n is a, c, g, or t
  misc_feature (120)..(120): n is a, c, g, or t
  misc_feature (123)..(123): n is a, c, g, or t
  misc_feature (129)..(129): n is a, c, g, or t
  misc_feature (132)..(132): n is a, c, g, or t
  misc_feature (135)..(135): n is a, c, g, or t
  misc_feature (138)..(138): n is a, c, g, or t
  misc_feature (141)..(141): n is a, c, g, or t
  misc_feature (147)..(147): n is a, c, g, or t
  misc_feature (150)..(150): n is a, c, g, or t
  misc_feature (156)..(156): n is a, c, g, or t
  misc_feature (159)..(159): n is a, c, g, or t
  misc_feature (162)..(162): n is a, c, g, or t
  misc_feature (168)..(168): n is a, c, g, or t
  misc_feature (171)..(171): n is a, c, g, or t
  misc_feature (180)..(180): n is a, c, g, or t
  misc_feature (183)..(183): n is a, c, g, or t
  misc_feature (189)..(189): n is a, c, g, or t
  misc_feature (198)..(198): n is a, c, g, or t
  misc_feature (204)..(204): n is a, c, g, or t
  misc_feature (207)..(207): n is a, c, g, or t
  misc_feature (213)..(213): n is a, c, g, or t
  misc_feature (216)..(216): n is a, c, g, or t
  misc_feature (219)..(219): n is a, c, g, or t
  misc_feature (222)..(222): n is a, c, g, or t
  misc_feature (225)..(225): n is a, c, g, or t
  misc_feature (228)..(228): n is a, c, g, or t
  misc_feature (231)..(231): n is a, c, g, or t
  misc_feature (234)..(234): n is a, c, g, or t
  misc_feature (237)..(237): n is a, c, g, or t
  misc_feature (240)..(240): n is a, c, g, or t
  misc_feature (243)..(243): n is a, c, g, or t
  misc_feature (246)..(246): n is a, c, g, or t
  misc_feature (249)..(249): n is a, c, g, or t
  misc_feature (252)..(252): n is a, c, g, or t
  misc_feature (255)..(255): n is a, c, g, or t
  misc_feature (258)..(258): n is a, c, g, or t
  misc_feature (261)..(261): n is a, c, g, or t
  misc_feature (264)..(264): n is a, c, g, or t
  misc_feature (270)..(270): n is a, c, g, or t
  misc_feature (273)..(273): n is a, c, g, or t
  misc_feature (276)..(276): n is a, c, g, or t
  misc_feature (279)..(279): n is a, c, g, or t
  misc_feature (285)..(285): n is a, c, g, or t
  misc_feature (288)..(288): n is a, c, g, or t
  misc_feature (294)..(294): n is a, c, g, or t
  misc_feature (297)..(297): n is a, c, g, or t
  misc_feature (306)..(306): n is a, c, g, or t
  misc_feature (309)..(309): n is a, c, g, or t
  misc_feature (315)..(315): n is a, c, g, or t
  misc_feature (318)..(318): n is a, c, g, or t
  misc_feature (321)..(321): n is a, c, g, or t
  misc_feature (324)..(324): n is a, c, g, or t
  misc_feature (327)..(327): n is a, c, g, or t
  misc_feature (330)..(330): n is a, c, g, or t
  misc_feature (333)..(333): n is a, c, g, or t
  misc_feature (336)..(336): n is a, c, g, or t
  misc_feature (339)..(339): n is a, c, g, or t
  misc_feature (342)..(342): n is a, c, g, or t
  misc_feature (345)..(345): n is a, c, g, or t
  misc_feature (348)..(348): n is a, c, g, or t
  misc_feature (351)..(351): n is a, c, g, or t
  misc_feature (354)..(354): n is a, c, g, or t
  misc_feature (357)..(357): n is a, c, g, or t
  misc_feature (360)..(360): n is a, c, g, or t
  misc_feature (363)..(363): n is a, c, g, or t
  misc_feature (366)..(366): n is a, c, g, or t
  misc_feature (369)..(369): n is a, c, g, or t
  misc_feature (372)..(372): n is a, c, g, or t
  misc_feature (375)..(375): n is a, c, g, or t
  misc_feature (378)..(378): n is a, c, g, or t
  misc_feature (384)..(384): n is a, c, g, or t
  misc_feature (387)..(387): n is a, c, g, or t
  misc_feature (393)..(393): n is a, c, g, or t
  misc_feature (396)..(396): n is a, c, g, or t
  misc_feature (405)..(405): n is a, c, g, or t
  misc_feature (408)..(408): n is a, c, g, or t
  misc_feature (411)..(411): n is a, c, g, or t
  misc_feature (414)..(414): n is a, c, g, or t
  misc_feature (417)..(417): n is a, c, g, or t
  misc_feature (420)..(420): n is a, c, g, or t
  misc_feature (423)..(423): n is a, c, g, or t
  misc_feature (426)..(426): n is a, c, g, or t
  misc_feature (432)..(432): n is a, c, g, or t
  misc_feature (441)..(441): n is a, c, g, or t
  misc_feature (447)..(447): n is a, c, g, or t
  misc_feature (450)..(450): n is a, c, g, or t
ggnccnccnggnccnccnggnccngcnggnggnccnggngcnaarggnccnmgnggngarmgnggnathwsnggngcnathggnccnccnggnccnmgnggngayathggnccnccnggnccncarggnccnccnggnccncarggnccnaayggnytnwsnathccnggngarcarggnmgncarggnatgaarggngaygcnggngarccnggnytnccnggnmgnacnggnacnccnggnytnccnggnccnccnggnccnatgggnccnccnggngaymgnggnttyacnggnaargayggngcnatgggnccnmgnggnccnccnggnccnccnggnwsnccnggnwsnccnggngtnacnggnccnwsnggnaarccnggnaarccnggngaycayggnmgnccnggnccnwsnggnytnaarggngaraarggngaymgnggngayath

SEQ ID NO: 1124 - DNA, 309 bp, Artificial Sequence
  hCol-CNA29 (alpha1(XII) THD2)
  misc_feature (3)..(3): n is a, c, g, or t
  misc_feature (6)..(6): n is a, c, g, or t
  misc_feature (9)..(9): n is a, c, g, or t
  misc_feature (12)..(12): n is a, c, g, or t
  misc_feature (15)..(15): n is a, c, g, or t
  misc_feature (18)..(18): n is a, c, g, or t
  misc_feature (21)..(21): n is a, c, g, or t
  misc_feature (24)..(24): n is a, c, g, or t
  misc_feature (27)..(27): n is a, c, g, or t
  misc_feature (30)..(30): n is a, c, g, or t
  misc_feature (33)..(33): n is a, c, g, or t
  misc_feature (36)..(36): n is a, c, g, or t
  misc_feature (39)..(39): n is a, c, g, or t
  misc_feature (42)..(42): n is a, c, g, or t
  misc_feature (45)..(45): n is a, c, g, or t
  misc_feature (48)..(48): n is a, c, g, or t
  misc_feature (54)..(54): n is a, c, g, or t
  misc_feature (57)..(57): n is a, c, g, or t
  misc_feature (60)..(60): n is a, c, g, or t
  misc_feature (63)..(63): n is a, c, g, or t
  misc_feature (66)..(66): n is a, c, g, or t
  misc_feature (69)..(69): n is a, c, g, or t
  misc_feature (72)..(72): n is a, c, g, or t
  misc_feature (75)..(75): n is a, c, g, or t
  misc_feature (81)..(81): n is a, c, g, or t
  misc_feature (84)..(84): n is a, c, g, or t
  misc_feature (87)..(87): n is a, c, g, or t
  misc_feature (90)..(90): n is a, c, g, or t
  misc_feature (93)..(93): n is a, c, g, or t
  misc_feature (102)..(102): n is a, c, g, or t
  misc_feature (105)..(105): n is a, c, g, or t
  misc_feature (108)..(108): n is a, c, g, or t
  misc_feature (111)..(111): n is a, c, g, or t
  misc_feature (117)..(117): n is a, c, g, or t
  misc_feature (120)..(120): n is a, c, g, or t
  misc_feature (123)..(123): n is a, c, g, or t
  misc_feature (126)..(126): n is a, c, g, or t
  misc_feature (129)..(129): n is a, c, g, or t
  misc_feature (138)..(138): n is a, c, g, or t
  misc_feature (144)..(144): n is a, c, g, or t
  misc_feature (147)..(147): n is a, c, g, or t
  misc_feature (150)..(150): n is a, c, g, or t
  misc_feature (153)..(153): n is a, c, g, or t
  misc_feature (156)..(156): n is a, c, g, or t
  misc_feature (159)..(159): n is a, c, g, or t
  misc_feature (162)..(162): n is a, c, g, or t
  misc_feature (165)..(165): n is a, c, g, or t
  misc_feature (168)..(168): n is a, c, g, or t
  misc_feature (171)..(171): n is a, c, g, or t
  misc_feature (174)..(174): n is a, c, g, or t
  misc_feature (177)..(177): n is a, c, g, or t
  misc_feature (180)..(180): n is a, c, g, or t
  misc_feature (183)..(183): n is a, c, g, or t
  misc_feature (186)..(186): n is a, c, g, or t
  misc_feature (189)..(189): n is a, c, g, or t
  misc_feature (192)..(192): n is a, c, g, or t
  misc_feature (198)..(198): n is a, c, g, or t
  misc_feature (204)..(204): n is a, c, g, or t
  misc_feature (207)..(207): n is a, c, g, or t
  misc_feature (210)..(210): n is a, c, g, or t
  misc_feature (213)..(213): n is a, c, g, or t
  misc_feature (216)..(216): n is a, c, g, or t
  misc_feature (219)..(219): n is a, c, g, or t
  misc_feature (222)..(222): n is a, c, g, or t
  misc_feature (225)..(225): n is a, c, g, or t
  misc_feature (228)..(228): n is a, c, g, or t
  misc_feature (231)..(231): n is a, c, g, or t
  misc_feature (234)..(234): n is a, c, g, or t
  misc_feature (237)..(237): n is a, c, g, or t
  misc_feature (240)..(240): n is a, c, g, or t
  misc_feature (243)..(243): n is a, c, g, or t
  misc_feature (246)..(246): n is a, c, g, or t
  misc_feature (249)..(249): n is a, c, g, or t
  misc_feature (252)..(252): n is a, c, g, or t
  misc_feature (255)..(255): n is a, c, g, or t
  misc_feature (258)..(258): n is a, c, g, or t
  misc_feature (261)..(261): n is a, c, g, or t
  misc_feature (264)..(264): n is a, c, g, or t
  misc_feature (267)..(267): n is a, c, g, or t
  misc_feature (273)..(273): n is a, c, g, or t
  misc_feature (276)..(276): n is a, c, g, or t
  misc_feature (282)..(282): n is a, c, g, or t
  misc_feature (285)..(285): n is a, c, g, or t
  misc_feature (288)..(288): n is a, c, g, or t
  misc_feature (291)..(291): n is a, c, g, or t
  misc_feature (294)..(294): n is a, c, g, or t
  misc_feature (297)..(297): n is a, c, g, or t
  misc_feature (300)..(300): n is a, c, g, or t
  misc_feature (303)..(303): n is a, c, g, or t
ggnccnccnggnccnccnggnccnccnggnwsngcnggngcnmgnggngarccnggnccnggnggnmgnccnggnttyccnggnacnccnggnatgcarggnccnccnggngarmgnggnytnccnggngaraarggngarmgnggnacnggnwsnwsnggnccnmgnggnytnccnggnccnccnggnccncarggngarwsnmgnacnggnccnccnggnwsnacnggnwsnmgnggnccnccnggnccnccnggnmgnccnggnaaywsnggnathmgnggnccnccnggnccnccnggntaytgy

SEQ ID NO: 1125 - DNA, 285 bp, Artificial Sequence
  hCol-CNA30 (alpha1(XIII) THD1)
  misc_feature (3)..(3): n is a, c, g, or t
  misc_feature (6)..(6): n is a, c, g, or t
  misc_feature (9)..(9): n is a, c, g, or t
  misc_feature (12)..(12): n is a, c, g, or t
  misc_feature (15)..(15): n is a, c, g, or t
  misc_feature (18)..(18): n is a, c, g, or t
  misc_feature (21)..(21): n is a, c, g, or t
  misc_feature (24)..(24): n is a, c, g, or t
  misc_feature (27)..(27): n is a, c, g, or t
  misc_feature (30)..(30): n is a, c, g, or t
  misc_feature (33)..(33): n is a, c, g, or t
  misc_feature (36)..(36): n is a, c, g, or t
  misc_feature (39)..(39): n is a, c, g, or t
  misc_feature (48)..(48): n is a, c, g, or t
  misc_feature (51)..(51): n is a, c, g, or t
  misc_feature (57)..(57): n is a, c, g, or t
  misc_feature (63)..(63): n is a, c, g, or t
  misc_feature (66)..(66): n is a, c, g, or t
  misc_feature (69)..(69): n is a, c, g, or t
  misc_feature (72)..(72): n is a, c, g, or t
  misc_feature (75)..(75): n is a, c, g, or t
  misc_feature (78)..(78): n is a, c, g, or t
  misc_feature (81)..(81): n is a, c, g, or t
  misc_feature (84)..(84): n is a, c, g, or t
  misc_feature (90)..(90): n is a, c, g, or t
  misc_feature (93)..(93): n is a, c, g, or t
  misc_feature (96)..(96): n is a, c, g, or t
  misc_feature (99)..(99): n is a, c, g, or t
  misc_feature (108)..(108): n is a, c, g, or t
  misc_feature (111)..(111): n is a, c, g, or t
  misc_feature (114)..(114): n is a, c, g, or t
  misc_feature (117)..(117): n is a, c, g, or t
  misc_feature (120)..(120): n is a, c, g, or t
  misc_feature (123)..(123): n is a, c, g, or t
  misc_feature (126)..(126): n is a, c, g, or t
  misc_feature (132)..(132): n is a, c, g, or t
  misc_feature (135)..(135): n is a, c, g, or t
  misc_feature (138)..(138): n is a, c, g, or t
  misc_feature (141)..(141): n is a, c, g, or t
  misc_feature (144)..(144): n is a, c, g, or t
  misc_feature (150)..(150): n is a, c, g, or t
  misc_feature (153)..(153): n is a, c, g, or t
  misc_feature (159)..(159): n is a, c, g, or t
  misc_feature (162)..(162): n is a, c, g, or t
  misc_feature (165)..(165): n is a, c, g, or t
  misc_feature (171)..(171): n is a, c, g, or t
  misc_feature (174)..(174): n is a, c, g, or t
  misc_feature (180)..(180): n is a, c, g, or t
  misc_feature (186)..(186): n is a, c, g, or t
  misc_feature (189)..(189): n is a, c, g, or t
  misc_feature (195)..(195): n is a, c, g, or t
  misc_feature (198)..(198): n is a, c, g, or t
  misc_feature (201)..(201): n is a, c, g, or t
  misc_feature (207)..(207): n is a, c, g, or t
  misc_feature (216)..(216): n is a, c, g, or t
  misc_feature (219)..(219): n is a, c, g, or t
  misc_feature (222)..(222): n is a, c, g, or t
  misc_feature (225)..(225): n is a, c, g, or t
  misc_feature (228)..(228): n is a, c, g, or t
  misc_feature (231)..(231): n is a, c, g, or t
  misc_feature (234)..(234): n is a, c, g, or t
  misc_feature (240)..(240): n is a, c, g, or t
  misc_feature (243)..(243): n is a, c, g, or t
  misc_feature (246)..(246): n is a, c, g, or t
  misc_feature (252)..(252): n is a, c, g, or t
  misc_feature (261)..(261): n is a, c, g, or t
  misc_feature (270)..(270): n is a, c, g, or t
  misc_feature (279)..(279): n is a, c, g, or t
ggnccnccnggnccnacnggnmgnccnggnytnccnggngayaarggngcnathggnatgccnggnmgngtnggnwsnccnggngaygcnggnytnwsnathathggnccnmgnggnccnccnggncarccnggnacnmgnggnttyccnggnttyccnggnccnathggnytngayggnaarccnggncayccnggnccnaarggngayatgggnytnacnggnccnccnggncarccnggnccncarggncaraarggngaraarggncartgyggngartay

SEQ ID NO: 1126 - DNA, 516 bp, Artificial Sequence
  hCol-CNA31 (alpha1(XIII) THD2)
  misc_feature (3)..(3): n is a, c, g, or t
  misc_feature (6)..(6): n is a, c, g, or t
  misc_feature (9)..(9): n is a, c, g, or t
  misc_feature (12)..(12): n is a, c, g, or t
  misc_feature (15)..(15): n is a, c, g, or t
  misc_feature (18)..(18): n is a, c, g, or t
  misc_feature (21)..(21): n is a, c, g, or t
  misc_feature (24)..(24): n is a, c, g, or t
  misc_feature (27)..(27): n is a, c, g, or t
  misc_feature (30)..(30): n is a, c, g, or t
  misc_feature (33)..(33): n is a, c, g, or t
  misc_feature (36)..(36): n is a, c, g, or t
  misc_feature (39)..(39): n is a, c, g, or t
  misc_feature (42)..(42): n is a, c, g, or t
  misc_feature (45)..(45): n is a, c, g, or t
  misc_feature (48)..(48): n is a, c, g, or t
  misc_feature (54)..(54): n is a, c, g, or t
  misc_feature (57)..(57): n is a, c, g, or t
  misc_feature (60)..(60): n is a, c, g, or t
  misc_feature (63)..(63): n is a, c, g, or t
  misc_feature (66)..(66): n is a, c, g, or t
  misc_feature (69)..(69): n is a, c, g, or t
  misc_feature (75)..(75): n is a, c, g, or t
  misc_feature (78)..(78): n is a, c, g, or t
  misc_feature (81)..(81): n is a, c, g, or t
  misc_feature (84)..(84): n is a, c, g, or t
  misc_feature (87)..(87): n is a, c, g, or t
  misc_feature (90)..(90): n is a, c, g, or t
  misc_feature (93)..(93): n is a, c, g, or t
  misc_feature (96)..(96): n is a, c, g, or t
  misc_feature (99)..(99): n is a, c, g, or t
  misc_feature (102)..(102): n is a, c, g, or t
  misc_feature (105)..(105): n is a, c, g, or t
  misc_feature (111)..(111): n is a, c, g, or t
  misc_feature (117)..(117): n is a, c, g, or t
  misc_feature (120)..(120): n is a, c, g, or t
  misc_feature (129)..(129): n is a, c, g, or t
  misc_feature (138)..(138): n is a, c, g, or t
  misc_feature (141)..(141): n is a, c, g, or t
  misc_feature (147)..(147): n is a, c, g, or t
  misc_feature (153)..(153): n is a, c, g, or t
  misc_feature (156)..(156): n is a, c, g, or t
  misc_feature (162)..(162): n is a, c, g, or t
  misc_feature (165)..(165): n is a, c, g, or t
  misc_feature (171)..(171): n is a, c, g, or t
  misc_feature (174)..(174): n is a, c, g, or t
  misc_feature (183)..(183): n is a, c, g, or t
  misc_feature (186)..(186): n is a, c, g, or t
  misc_feature (192)..(192): n is a, c, g, or t
  misc_feature (195)..(195): n is a, c, g, or t
  misc_feature (198)..(198): n is a, c, g, or t
  misc_feature (201)..(201): n is a, c, g, or t
  misc_feature (207)..(207): n is a, c, g, or t
  misc_feature (210)..(210): n is a, c, g, or t
  misc_feature (213)..(213): n is a, c, g, or t
  misc_feature (216)..(216): n is a, c, g, or t
  misc_feature (225)..(225): n is a, c, g, or t
  misc_feature (231)..(231): n is a, c, g, or t
  misc_feature (234)..(234): n is a, c, g, or t
  misc_feature (240)..(240): n is a, c, g, or t
  misc_feature (243)..(243): n is a, c, g, or t
  misc_feature (246)..(246): n is a, c, g, or t
  misc_feature (252)..(252): n is a, c, g, or t
  misc_feature (261)..(261): n is a, c, g, or t
  misc_feature (264)..(264): n is a, c, g, or t
  misc_feature (270)..(270): n is a, c, g, or t
  misc_feature (273)..(273): n is a, c, g, or t
  misc_feature (276)..(276): n is a, c, g, or t
  misc_feature (279)..(279): n is a, c, g, or t
  misc_feature (282)..(282): n is a, c, g, or t
  misc_feature (285)..(285): n is a, c, g, or t
  misc_feature (288)..(288): n is a, c, g, or t
  misc_feature (291)..(291): n is a, c, g, or t
  misc_feature (294)..(294): n is a, c, g, or t
  misc_feature (297)..(297): n is a, c, g, or t
  misc_feature (306)..(306): n is a, c, g, or t
  misc_feature (315)..(315): n is a, c, g, or t
  misc_feature (321)..(321): n is a, c, g, or t
  misc_feature (324)..(324): n is a, c, g, or t
  misc_feature (330)..(330): n is a, c, g, or t
  misc_feature (336)..(336): n is a, c, g, or t
  misc_feature (339)..(339): n is a, c, g, or t
  misc_feature (342)..(342): n is a, c, g, or t
  misc_feature (345)..(345): n is a, c, g, or t
  misc_feature (348)..(348): n is a, c, g, or t
  misc_feature (354)..(354): n is a, c, g, or t
  misc_feature (357)..(357): n is a, c, g, or t
  misc_feature (360)..(360): n is a, c, g, or t
  misc_feature (363)..(363): n is a, c, g, or t
  misc_feature (366)..(366): n is a, c, g, or t
  misc_feature (369)..(369): n is a, c, g, or t
  misc_feature (372)..(372): n is a, c, g, or t
  misc_feature (375)..(375): n is a, c, g, or t
  misc_feature (378)..(378): n is a, c, g, or t
  misc_feature (381)..(381): n is a, c, g, or t
  misc_feature (384)..(384): n is a, c, g, or t
  misc_feature (387)..(387): n is a, c, g, or t
  misc_feature (393)..(393): n is a, c, g, or t
  misc_feature (399)..(399): n is a, c, g, or t
  misc_feature (402)..(402): n is a, c, g, or t
  misc_feature (405)..(405): n is a, c, g, or t
  misc_feature (411)..(411): n is a, c, g, or t
  misc_feature (417)..(417): n is a, c, g, or t
  misc_feature (420)..(420): n is a, c, g, or t
  misc_feature (423)..(423): n is a, c, g, or t
  misc_feature (426)..(426): n is a, c, g, or t
  misc_feature (429)..(429): n is a, c, g, or t
  misc_feature (435)..(435): n is a, c, g, or t
  misc_feature (438)..(438): n is a, c, g, or t
  misc_feature (447)..(447): n is a, c, g, or t
  misc_feature (453)..(453): n is a, c, g, or t
  misc_feature (456)..(456): n is a, c, g, or t
  misc_feature (459)..(459): n is a, c, g, or t
  misc_feature (462)..(462): n is a, c, g, or t
  misc_feature (465)..(465): n is a, c, g, or t
  misc_feature (474)..(474): n is a, c, g, or t
  misc_feature (477)..(477): n is a, c, g, or t
  misc_feature (483)..(483): n is a, c, g, or t
  misc_feature (486)..(486): n is a, c, g, or t
  misc_feature (492)..(492): n is a, c, g, or t
  misc_feature (495)..(495): n is a, c, g, or t
  misc_feature (501)..(501): n is a, c, g, or t
  misc_feature (507)..(507): n is a, c, g, or t
  misc_feature (510)..(510): n is a, c, g, or t
  misc_feature (516)..(516): n is a, c, g, or t
ggnccnccnggnccnccnggnccnccnggnccnwsnggnccnytnggncayccnggnytnccnggnccnatgggnccnccnggnytnccnggnccnccnggnccnaarggngayccnggnathcarggntaycayggnmgnaarggngarmgnggnatgccnggnatgccnggnaarcayggngcnaarggngcnccnggnathgcngtngcnggnatgaarggngarccnggnathccnggnacnaarggngaraarggngcngarggnwsnccnggnytnccnggnytnytnggncaraarggngaraarggngaygcnggnaaywsnathggnggnggnmgnggngarccnggnccnccnggnytnccnggnccnccnggnccnaarggngargcnggngtngayggncargtnggnccnccnggncarccnggngayaarggngarmgnggngcngcnggngarcarggnccngayggnccnaarggnwsnaarggngarccnggnaarggn

SEQ ID NO: 1127 - DNA, 708 bp, Artificial Sequence
  hCol-CNA32 (alpha1(XIII) THD3)
  misc_feature (3)..(3): n is a, c, g, or t
  misc_feature (6)..(6): n is a, c, g, or t
  misc_feature (9)..(9): n is a, c, g, or t
  misc_feature (12)..(12): n is a, c, g, or t
  misc_feature (15)..(15): n is a, c, g, or t
  misc_feature (18)..(18): n is a, c, g, or t
  misc_feature (21)..(21): n is a, c, g, or t
  misc_feature (30)..(30): n is a, c, g, or t
  misc_feature (33)..(33): n is a, c, g, or t
  misc_feature (36)..(36): n is a, c, g, or t
  misc_feature (39)..(39): n is a, c, g, or t
  misc_feature (42)..(42): n is a, c, g, or t
  misc_feature (45)..(45): n is a, c, g, or t
  misc_feature (48)..(48): n is a, c, g, or t
  misc_feature (54)..(54): n is a, c, g, or t
  misc_feature (57)..(57): n is a, c, g, or t
  misc_feature (66)..(66): n is a, c, g, or t
  misc_feature (75)..(75): n is a, c, g, or t
  misc_feature (78)..(78): n is a, c, g, or t
  misc_feature (81)..(81): n is a, c, g, or t
  misc_feature (84)..(84): n is a, c, g, or t
  misc_feature (87)..(87): n is a, c, g, or t
  misc_feature (90)..(90): n is a, c, g, or t
  misc_feature (93)..(93): n is a, c, g, or t
  misc_feature (102)..(102): n is a, c, g, or t
  misc_feature (111)..(111): n is a, c, g, or t
  misc_feature (114)..(114): n is a, c, g, or t
  misc_feature (117)..(117): n is a, c, g, or t
  misc_feature (120)..(120): n is a, c, g, or t
  misc_feature (126)..(126): n is a, c, g, or t
  misc_feature (129)..(129): n is a, c, g, or t
  misc_feature (138)..(138): n is a, c, g, or t
  misc_feature (141)..(141): n is a, c, g, or t
  misc_feature (144)..(144): n is a, c, g, or t
  misc_feature (147)..(147): n is a, c, g, or t
  misc_feature (150)..(150): n is a, c, g, or t
  misc_feature (156)..(156): n is a, c, g, or t
  misc_feature (159)..(159): n is a, c, g, or t
  misc_feature (162)..(162): n is a, c, g, or t
  misc_feature (165)..(165): n is a, c, g, or t
  misc_feature (174)..(174): n is a, c, g, or t
  misc_feature (177)..(177): n is a, c, g, or t
  misc_feature (180)..(180): n is a, c, g, or t
  misc_feature (183)..(183): n is a, c, g, or t
  misc_feature (186)..(186): n is a, c, g, or t
  misc_feature (192)..(192): n is a, c, g, or t
  misc_feature (201)..(201): n is a, c, g, or t
  misc_feature (207)..(207): n is a, c, g, or t
  misc_feature (210)..(210): n is a, c, g, or t
  misc_feature (213)..(213): n is a, c, g, or t
  misc_feature (216)..(216): n is a, c, g, or t
  misc_feature (219)..(219): n is a, c, g, or t
  misc_feature (228)..(228): n is a, c, g, or t
  misc_feature (237)..(237): n is a, c, g, or t
  misc_feature (243)..(243): n is a, c, g, or t
  misc_feature (246)..(246): n is a, c, g, or t
  misc_feature (252)..(252): n is a, c, g, or t
  misc_feature (255)..(255): n is a, c, g, or t
  misc_feature (258)..(258): n is a, c, g, or t
  misc_feature (261)..(261): n is a, c, g, or t
  misc_feature (264)..(264): n is a, c, g, or t
  misc_feature (273)..(273): n is a, c, g, or t
  misc_feature (279)..(279): n is a, c, g, or t
  misc_feature (282)..(282): n is a, c, g, or t
  misc_feature (291)..(291): n is a, c, g, or t
  misc_feature (297)..(297): n is a, c, g, or t
  misc_feature (300)..(300): n is a, c, g, or t
  misc_feature (303)..(303): n is a, c, g, or t
  misc_feature (309)..(309): n is a, c, g, or t
  misc_feature (312)..(312): n is a, c, g, or t
  misc_feature (315)..(315): n is a, c, g, or t
  misc_feature (318)..(318): n is a, c, g, or t
  misc_feature (321)..(321): n is a, c, g, or t
  misc_feature (324)..(324): n is a, c, g, or t
  misc_feature (327)..(327): n is a, c, g, or t
  misc_feature (333)..(333): n is a, c, g, or t
  misc_feature (336)..(336): n is a, c, g, or t
  misc_feature (339)..(339): n is a, c, g, or t
  misc_feature (342)..(342): n is a, c, g, or t
  misc_feature (345)..(345): n is a, c, g, or t
  misc_feature (348)..(348): n is a, c, g, or t
  misc_feature (351)..(351): n is a, c, g, or t
  misc_feature (354)..(354): n is a, c, g, or t
  misc_feature (360)..(360): n is a, c, g, or t
  misc_feature (363)..(363): n is a, c, g, or t
  misc_feature (366)..(366): n is a, c, g, or t
  misc_feature (369)..(369): n is a, c, g, or t
  misc_feature (372)..(372): n is a, c, g, or t
  misc_feature (378)..(378): n is a, c, g, or t
  misc_feature (384)..(384): n is a, c, g, or t
  misc_feature (387)..(387): n is a, c, g, or t
  misc_feature (390)..(390): n is a, c, g, or t
  misc_feature (396)..(396): n is a, c, g, or t
  misc_feature (399)..(399): n is a, c, g, or t
  misc_feature (405)..(405): n is a, c, g, or t
  misc_feature (414)..(414): n is a, c, g, or t
  misc_feature (423)..(423): n is a, c, g, or t
  misc_feature (432)..(432): n is a, c, g, or t
  misc_feature (438)..(438): n is a, c, g, or t
  misc_feature (441)..(441): n is a, c, g, or t
  misc_feature (444)..(444): n is a, c, g, or t
  misc_feature (447)..(447): n is a, c, g, or t
  misc_feature (450)..(450): n is a, c, g, or t
  misc_feature (453)..(453): n is a, c, g, or t
  misc_feature (456)..(456): n is a, c, g, or t
  misc_feature (459)..(459): n is a, c, g, or t
  misc_feature (462)..(462): n is a, c, g, or t
  misc_feature (465)..(465): n is a, c, g, or t
  misc_feature (468)..(468): n is a, c, g, or t
  misc_feature (471)..(471): n is a, c, g, or t
  misc_feature (477)..(477): n is a, c, g, or t
  misc_feature (480)..(480): n is a, c, g, or t
  misc_feature (483)..(483): n is a, c, g, or t
  misc_feature (486)..(486): n is a, c, g, or t
  misc_feature (489)..(489): n is a, c, g, or t
  misc_feature (492)..(492): n is a, c, g, or t
  misc_feature (495)..(495): n is a, c, g, or t
  misc_feature (498)..(498): n is a, c, g, or t
  misc_feature (501)..(501): n is a, c, g, or t
  misc_feature (504)..(504): n is a, c, g, or t
  misc_feature (507)..(507): n is a, c, g, or t
  misc_feature (513)..(513): n is a, c, g, or t
  misc_feature (516)..(516): n is a, c, g, or t
  misc_feature (519)..(519): n is a, c, g, or t
  misc_feature (522)..(522): n is a, c, g, or t
  misc_feature (525)..(525): n is a, c, g, or t
  misc_feature (528)..(528): n is a, c, g, or t
  misc_feature (531)..(531): n is a, c, g, or t
  misc_feature (534)..(534): n is a, c, g, or t
  misc_feature (540)..(540): n is a, c, g, or t
  misc_feature (546)..(546): n is a, c, g, or t
  misc_feature (549)..(549): n is a, c, g, or t
  misc_feature (552)..(552): n is a, c, g, or t
  misc_feature (558)..(558): n is a, c, g, or t
  misc_feature (564)..(564): n is a, c, g, or t
  misc_feature (567)..(567): n is a, c, g, or t
  misc_feature (573)..(573): n is a, c, g, or t
  misc_feature (576)..(576): n is a, c, g, or t
  misc_feature (579)..(579): n is a, c, g, or t
  misc_feature (582)..(582): n is a, c, g, or t
  misc_feature (585)..(585): n is a, c, g, or t
  misc_feature (588)..(588): n is a, c, g, or t
  misc_feature (591)..(591): n is a, c, g, or t
  misc_feature (594)..(594): n is a, c, g, or t
  misc_feature (597)..(597): n is a, c, g, or t
  misc_feature (600)..(600): n is a, c, g, or t
  misc_feature (603)..(603): n is a, c, g, or t
  misc_feature (606)..(606): n is a, c, g, or t
  misc_feature (612)..(612): n is a, c, g, or t
  misc_feature (615)..(615): n is a, c, g, or t
  misc_feature (618)..(618): n is a, c, g, or t
  misc_feature (621)..(621): n is a, c, g, or t
  misc_feature (630)..(630): n is a, c, g, or t
  misc_feature (636)..(636): n is a, c, g, or t
  misc_feature (639)..(639): n is a, c, g, or t
  misc_feature (645)..(645): n is a, c, g, or t
  misc_feature (648)..(648): n is a, c, g, or t
  misc_feature (657)..(657): n is a, c, g, or t
  misc_feature (660)..(660): n is a, c, g, or t
  misc_feature (663)..(663): n is a, c, g, or t
  misc_feature (666)..(666): n is a, c, g, or t
  misc_feature (669)..(669): n is a, c, g, or t
  misc_feature (675)..(675): n is a, c, g, or t
  misc_feature (684)..(684): n is a, c, g, or t
  misc_feature (693)..(693): n is a, c, g, or t
  misc_feature (696)..(696): n is a, c, g, or t
  misc_feature (699)..(699): n is a, c, g, or t
  misc_feature (702)..(702): n is a, c, g, or t
  misc_feature (705)..(705): n is a, c, g, or t
ggnccnccnggnytnccnggncarathggnccnccnggngcnccnggnathccnggncaraarggngarathggnytnccnggnccnccnggncaygayggngaraarggnccnmgnggnaarccnggngayatgggnccnccnggnccncarggnccnccnggnaargayggnccnccnggngtnaarggngaraayggncayccnggnwsnccnggngaraarggngaraarggngaracnggncargcnggnwsnccnggngaraarggngargcnggngaraarggnaayccnggngcngargtnccnggnytnccnggnccngarggnccnccnggnccnccnggnytncarggngtnccnggnccnaarggngargcnggnytngayggngcnaarggngaraarggnttycarggngaraarggngaymgnggnccnytnggnytnccnggngcnwsnggnytngayggnmgnccnggnccnccnggnacnccnggnccnathggngtnccnggnccngcnggnccnaarggngarmgnggnwsnaarggngayccnggnatgacnggnccnacnggngcngcnggnytnccnggnytncayggnccnccnggngayaarggnaaymgnggngarmgnggnaaraarggnwsnmgnggnccnaarggngayaarggngaycarggngcnccnggnytngay

SEQ ID NO: 1128 - DNA, 456 bp, Artificial Sequence
  hCol-CNA33 (alpha1(XIV) THD1)
  misc_feature (3)..(3): n is a, c, g, or t
  misc_feature (6)..(6): n is a, c, g, or t
  misc_feature (9)..(9): n is a, c, g, or t
  misc_feature (12)..(12): n is a, c, g, or t
  misc_feature (15)..(15): n is a, c, g, or t
  misc_feature (18)..(18): n is a, c, g, or t
  misc_feature (21)..(21): n is a, c, g, or t
  misc_feature (24)..(24): n is a, c, g, or t
  misc_feature (27)..(27): n is a, c, g, or t
  misc_feature (30)..(30): n is a, c, g, or t
  misc_feature (33)..(33): n is a, c, g, or t
  misc_feature (36)..(36): n is a, c, g, or t
  misc_feature (39)..(39): n is a, c, g, or t
  misc_feature (42)..(42): n is a, c, g, or t
  misc_feature (45)..(45): n is a, c, g, or t
  misc_feature (48)..(48): n is a, c, g, or t
  misc_feature (51)..(51): n is a, c, g, or t
  misc_feature (57)..(57): n is a, c, g, or t
  misc_feature (66)..(66): n is a, c, g, or t
  misc_feature (72)..(72): n is a, c, g, or t
  misc_feature (75)..(75): n is a, c, g, or t
  misc_feature (78)..(78): n is a, c, g, or t
  misc_feature (84)..(84): n is a, c, g, or t
  misc_feature (87)..(87): n is a, c, g, or t
  misc_feature (93)..(93): n is a, c, g, or t
  misc_feature (96)..(96): n is a, c, g, or t
  misc_feature (99)..(99): n is a, c, g, or t
  misc_feature (102)..(102): n is a, c, g, or t
  misc_feature (111)..(111): n is a, c, g, or t
  misc_feature (114)..(114): n is a, c, g, or t
  misc_feature (117)..(117): n is a, c, g, or t
  misc_feature (120)..(120): n is a, c, g, or t
  misc_feature (123)..(123): n is a, c, g, or t
  misc_feature (129)..(129): n is a, c, g, or t
  misc_feature (132)..(132): n is a, c, g, or t
  misc_feature (135)..(135): n is a, c, g, or t
  misc_feature (138)..(138): n is a, c, g, or t
  misc_feature (141)..(141): n is a, c, g, or t
  misc_feature (147)..(147): n is a, c, g, or t
  misc_feature (150)..(150): n is a, c, g, or t
  misc_feature (153)..(153): n is a, c, g, or t
  misc_feature (156)..(156): n is a, c, g, or t
  misc_feature (159)..(159): n is a, c, g, or t
  misc_feature (162)..(162): n is a, c, g, or t
  misc_feature (171)..(171): n is a, c, g, or t
  misc_feature (177)..(177): n is a, c, g, or t
  misc_feature (180)..(180): n is a, c, g, or t
  misc_feature (186)..(186): n is a, c, g, or t
  misc_feature (189)..(189): n is a, c, g, or t
  misc_feature (198)..(198): n is a, c, g, or t
  misc_feature (207)..(207): n is a, c, g, or t
  misc_feature (213)..(213): n is a, c, g, or t
  misc_feature (216)..(216): n is a, c, g, or t
  misc_feature (219)..(219): n is a, c, g, or t
  misc_feature (222)..(222): n is a, c, g, or t
  misc_feature (225)..(225): n is a, c, g, or t
  misc_feature (228)..(228): n is a, c, g, or t
  misc_feature (234)..(234): n is a, c, g, or t
  misc_feature (240)..(240): n is a, c, g, or t
  misc_feature (243)..(243): n is a, c, g, or t
  misc_feature (246)..(246): n is a, c, g, or t
  misc_feature (249)..(249): n is a, c, g, or t
  misc_feature (252)..(252): n is a, c, g, or t
  misc_feature (255)..(255): n is a, c, g, or t
  misc_feature (258)..(258): n is a, c, g, or t
  misc_feature (261)..(261): n is a, c, g, or t
  misc_feature (264)..(264): n is a, c, g, or t
  misc_feature (270)..(270): n is a, c, g, or t
  misc_feature (273)..(273): n is a, c, g, or t
  misc_feature (276)..(276): n is a, c, g, or t
  misc_feature (279)..(279): n is a, c, g, or t
  misc_feature (285)..(285): n is a, c, g, or t
  misc_feature (288)..(288): n is a, c, g, or t
  misc_feature (291)..(291): n is a, c, g, or t
  misc_feature (294)..(294): n is a, c, g, or t
  misc_feature (297)..(297): n is a, c, g, or t
  misc_feature (306)..(306): n is a, c, g, or t
  misc_feature (309)..(309): n is a, c, g, or t
  misc_feature (312)..(312): n is a, c, g, or t
  misc_feature (315)..(315): n is a, c, g, or t
  misc_feature (318)..(318): n is a, c, g, or t
  misc_feature (321)..(321): n is a, c, g, or t
  misc_feature (324)..(324): n is a, c, g, or t
  misc_feature (327)..(327): n is a, c, g, or t
  misc_feature (330)..(330): n is a, c, g, or t
  misc_feature (333)..(333): n is a, c, g, or t
  misc_feature (336)..(336): n is a, c, g, or t
  misc_feature (342)..(342): n is a, c, g, or t
  misc_feature (348)..(348): n is a, c, g, or t
  misc_feature (351)..(351): n is a, c, g, or t
  misc_feature (354)..(354): n is a, c, g, or t
  misc_feature (357)..(357): n is a, c, g, or t
  misc_feature (360)..(360): n is a, c, g, or t
  misc_feature (363)..(363): n is a, c, g, or t
  misc_feature (366)..(366): n is a, c, g, or t
  misc_feature (369)..(369): n is a, c, g, or t
  misc_feature (375)..(375): n is a, c, g, or t
  misc_feature (378)..(378): n is a, c, g, or t
  misc_feature (381)..(381): n is a, c, g, or t
  misc_feature (387)..(387): n is a, c, g, or t
  misc_feature (390)..(390): n is a, c, g, or t
  misc_feature (396)..(396): n is a, c, g, or t
  misc_feature (399)..(399): n is a, c, g, or t
  misc_feature (402)..(402): n is a, c, g, or t
  misc_feature (405)..(405): n is a, c, g, or t
  misc_feature (408)..(408): n is a, c, g, or t
  misc_feature (411)..(411): n is a, c, g, or t
  misc_feature (414)..(414): n is a, c, g, or t
  misc_feature (417)..(417): n is a, c, g, or t
  misc_feature (420)..(420): n is a, c, g, or t
  misc_feature (423)..(423): n is a, c, g, or t
  misc_feature (426)..(426): n is a, c, g, or t
  misc_feature (432)..(432): n is a, c, g, or t
  misc_feature (438)..(438): n is a, c, g, or t
  misc_feature (441)..(441): n is a, c, g, or t
  misc_feature (447)..(447): n is a, c, g, or t
  misc_feature (450)..(450): n is a, c, g, or t
  misc_feature (456)..(456): n is a, c, g, or t
gtngcnytnggnccngcnggnccnccnggnggnccnggnytnmgnggnccnaarggncarcarggngarccnggnccnaarggnccngayggnccnmgnggngarathggnytnccnggnccncarggnccnccnggnccncarggnccnwsnggnytnwsnathcarggnatgccnggnatgccnggngaraarggngaraarggngayacnggnytnccnggnccncarggnathccnggnggngtnggnwsnccnggnmgngayggnwsnccnggncarmgnggnytnccnggnaargayggnwsnwsnggnccnccnggnccnccnggnccnathggnathccnggnacnccnggngtnccnggnathacnggnwsnatgggnccncarggngcnytnggnccnccnggngtnccnggngcnaarggngarmgnggngarmgnggngayytn

SEQ ID NO: 1129 - DNA, 378 bp, Artificial Sequence
  hCol-CNA34 (alpha1(XIV) THD2)
  misc_feature (3)..(3): n is a, c, g, or t
  misc_feature (6)..(6): n is a, c, g, or t
  misc_feature (9)..(9): n is a, c, g, or t
  misc_feature (12)..(12): n is a, c, g, or t
  misc_feature (18)..(18): n is a, c, g, or t
  misc_feature (21)..(21): n is a, c, g, or t
  misc_feature (24)..(24): n is a, c, g, or t
  misc_feature (27)..(27): n is a, c, g, or t
  misc_feature (30)..(30): n is a, c, g, or t
  misc_feature (33)..(33): n is a, c, g, or t
  misc_feature (36)..(36): n is a, c, g, or t
  misc_feature (39)..(39): n is a, c, g, or t
  misc_feature (42)..(42): n is a, c, g, or t
  misc_feature (45)..(45): n is a, c, g, or t
  misc_feature (48)..(48): n is a, c, g, or t
  misc_feature (57)..(57): n is a, c, g, or t
  misc_feature (60)..(60): n is a, c, g, or t
  misc_feature (63)..(63): n is a, c, g, or t
  misc_feature (66)..(66): n is a, c, g, or t
  misc_feature (69)..(69): n is a, c, g, or t
  misc_feature (72)..(72): n is a, c, g, or t
  misc_feature (75)..(75): n is a, c, g, or t
  misc_feature (81)..(81): n is a, c, g, or t
  misc_feature (84)..(84): n is a, c, g, or t
  misc_feature (90)..(90): n is a, c, g, or t
  misc_feature (93)..(93): n is a, c, g, or t
  misc_feature (96)..(96): n is a, c, g, or t
  misc_feature (99)..(99): n is a, c, g, or t
  misc_feature (102)..(102): n is a, c, g, or t
  misc_feature (105)..(105): n is a, c, g, or t
  misc_feature (108)..(108): n is a, c, g, or t
  misc_feature (111)..(111): n is a, c, g, or t
  misc_feature (117)..(117): n is a, c, g, or t
  misc_feature (120)..(120): n is a, c, g, or t
  misc_feature (123)..(123): n is a, c, g, or t
  misc_feature (126)..(126): n is a, c, g, or t
  misc_feature (129)..(129): n is a, c, g, or t
  misc_feature (138)..(138): n is a, c, g, or t
  misc_feature (147)..(147): n is a, c, g, or t
  misc_feature (153)..(153): n is a, c, g, or t
  misc_feature (156)..(156): n is a, c, g, or t
  misc_feature (159)..(159): n is a, c, g, or t
  misc_feature (162)..(162): n is a, c, g, or t
  misc_feature (165)..(165): n is a, c, g, or t
  misc_feature (171)..(171): n is a, c, g, or t
  misc_feature (174)..(174): n is a, c, g, or t
  misc_feature (177)..(177): n is a, c, g, or t
  misc_feature (180)..(180): n is a, c, g, or t
  misc_feature (183)..(183): n is a, c, g, or t
  misc_feature (186)..(186): n is a, c, g, or t
  misc_feature (189)..(189): n is a, c, g, or t
  misc_feature (192)..(192): n is a, c, g, or t
  misc_feature (195)..(195): n is a, c, g, or t
  misc_feature (198)..(198): n is a, c, g, or t
  misc_feature (201)..(201): n is a, c, g, or t
  misc_feature (204)..(204): n is a, c, g, or t
  misc_feature (207)..(207): n is a, c, g, or t
  misc_feature (213)..(213): n is a, c, g, or t
  misc_feature (216)..(216): n is a, c, g, or t
  misc_feature (219)..(219): n is a, c, g, or t
  misc_feature (222)..(222): n is a, c, g, or t
  misc_feature (225)..(225): n is a, c, g, or t
  misc_feature (228)..(228): n is a, c, g, or t
  misc_feature (231)..(231): n is a, c, g, or t
  misc_feature (234)..(234): n is a, c, g, or t
  misc_feature (237)..(237): n is a, c, g, or t
  misc_feature (240)..(240): n is a, c, g, or t
  misc_feature (243)..(243): n is a, c, g, or t
  misc_feature (246)..(246): n is a, c, g, or t
  misc_feature (249)..(249): n is a, c, g, or t
  misc_feature (252)..(252): n is a, c, g, or t
  misc_feature (255)..(255): n is a, c, g, or t
  misc_feature (258)..(258): n is a, c, g, or t
  misc_feature (261)..(261): n is a, c, g, or t
  misc_feature (264)..(264): n is a, c, g, or t
  misc_feature (267)..(267): n is a, c, g, or t
  misc_feature (273)..(273): n is a, c, g, or t
  misc_feature (276)..(276): n is a, c, g, or t
  misc_feature (279)..(279): n is a, c, g, or t
  misc_feature (282)..(282): n is a, c, g, or t
  misc_feature (285)..(285): n is a, c, g, or t
  misc_feature (288)..(288): n is a, c, g, or t
  misc_feature (294)..(294): n is a, c, g, or t
  misc_feature (297)..(297): n is a, c, g, or t
  misc_feature (300)..(300): n is a, c, g, or t
  misc_feature (303)..(303): n is a, c, g, or t
  misc_feature (309)..(309): n is a, c, g, or t
  misc_feature (312)..(312): n is a, c, g, or t
  misc_feature (324)..(324): n is a, c, g, or t
  misc_feature (327)..(327): n is a, c, g, or t
  misc_feature (330)..(330): n is a, c, g, or t
  misc_feature (336)..(336): n is a, c, g, or t
  misc_feature (339)..(339): n is a, c, g, or t
  misc_feature (345)..(345): n is a, c, g, or t
  misc_feature (348)..(348): n is a, c, g, or t
  misc_feature (351)..(351): n is a, c, g, or t
  misc_feature (354)..(354): n is a, c, g, or t
  misc_feature (357)..(357): n is a, c, g, or t
  misc_feature (363)..(363): n is a, c, g, or t
  misc_feature (372)..(372): n is a, c, g, or t
ggnccnccnggngarccnggnmgnccnggnwsnccnggngcnccnggngarcarggnccnccnggnacnccnggnttyccnggnaaygcnggngtnccnggnacnccnggngarmgnggnytnacnggnathaarggngaraarggnaayccnggngtnggnacncarggnccnmgnggnccnccnggnccngcnggnccnwsnggngarwsnmgnccnggnwsnccnggnccnccnggnwsnccnggnccnmgnggnccnccnggncayytnggngtnccnggnccncarggnccnwsnggncarccnggntaytgygayccnwsnwsntgywsngcntayggngtnmgngcnccncayccngaycarccngartty

SEQ ID NO: 1130 - DNA, 1542 bp, Artificial Sequence
  hCol-CNA35 (alpha1(XV) THD)
  misc_feature (3)..(3): n is a, c, g, or t
  misc_feature (6)..(6): n is a, c, g, or t
  misc_feature (9)..(9): n is a, c, g, or t
  misc_feature (12)..(12): n is a, c, g, or t
  misc_feature (15)..(15): n is a, c, g, or t
  misc_feature (18)..(18): n is a, c, g, or t
  misc_feature (21)..(21): n is a, c, g, or t
  misc_feature (24)..(24): n is a, c, g, or t
  misc_feature (27)..(27): n is a, c, g, or t
  misc_feature (30)..(30): n is a, c, g, or t
  misc_feature (33)..(33): n is a, c, g, or t
  misc_feature (36)..(36): n is a, c, g, or t
  misc_feature (39)..(39): n is a, c, g, or t
  misc_feature (45)..(45): n is a, c, g, or t
  misc_feature (48)..(48): n is a, c, g, or t
  misc_feature (54)..(54): n is a, c, g, or t
  misc_feature (57)..(57): n is a, c, g, or t
  misc_feature (60)..(60): n is a, c, g, or t
  misc_feature (66)..(66): n is a, c, g, or t
  misc_feature (75)..(75): n is a, c, g, or t
  misc_feature (78)..(78): n is a, c, g, or t
  misc_feature (81)..(81): n is a, c, g, or t
  misc_feature (84)..(84): n is a, c, g, or t
  misc_feature (87)..(87): n is a, c, g, or t
  misc_feature (90)..(90): n is a, c, g, or t
  misc_feature (93)..(93): n is a, c, g, or t
  misc_feature (102)..(102): n is a, c, g, or t
  misc_feature (105)..(105): n is a, c, g, or t
  misc_feature (108)..(108): n is a, c, g, or t
  misc_feature (111)..(111): n is a, c, g, or t
  misc_feature (117)..(117): n is a, c, g, or t
  misc_feature (120)..(120): n is a, c, g, or t
  misc_feature (123)..(123): n is a, c, g, or t
  misc_feature (126)..(126): n is a, c, g, or t
  misc_feature (129)..(129): n is a, c, g, or t
  misc_feature (132)..(132): n is a, c, g, or t
  misc_feature (138)..(138): n is a, c, g, or t
  misc_feature (144)..(144): n is a, c, g, or t
  misc_feature (147)..(147): n is a, c, g, or t
  misc_feature (150)..(150): n is a, c, g, or t
  misc_feature (156)..(156): n is a, c, g, or t
  misc_feature (159)..(159): n is a, c, g, or t
  misc_feature (162)..(162): n is a, c, g, or t
  misc_feature (165)..(165): n is a, c, g, or t
  misc_feature (168)..(168): n is a, c, g, or t
  misc_feature (171)..(171): n is a, c, g, or t
  misc_feature (174)..(174): n is a, c, g, or t
  misc_feature (183)..(183): n is a, c, g, or t
  misc_feature (192)..(192): n is a, c, g, or t
  misc_feature (195)..(195): n is a, c, g, or t
  misc_feature (198)..(198): n is a, c, g, or t
  misc_feature (201)..(201): n is a, c, g, or t
  misc_feature (204)..(204): n is a, c, g, or t
  misc_feature (210)..(210): n is a, c, g, or t
  misc_feature (213)..(213): n is a, c, g, or t
  misc_feature (216)..(216): n is a, c, g, or t
  misc_feature (219)..(219): n is a, c, g, or t
  misc_feature (228)..(228): n is a, c, g, or t
  misc_feature (234)..(234): n is a, c, g, or t
  misc_feature (237)..(237): n is a, c, g, or t
  misc_feature (243)..(243): n is a, c, g, or t
  misc_feature (246)..(246): n is a, c, g, or t
  misc_feature (249)..(249): n is a, c, g, or t
  misc_feature (252)..(252): n is a, c, g, or t
  misc_feature (255)..(255): n is a, c, g, or t
  misc_feature (258)..(258): n is a, c, g, or t
  misc_feature (261)..(261): n is a, c, g, or t
  misc_feature (264)..(264): n is a, c, g, or t
  misc_feature (273)..(273): n is a, c, g, or t
  misc_feature (279)..(279): n is a, c, g, or t
  misc_feature (282)..(282): n is a, c, g, or t
  misc_feature (285)..(285): n is a, c, g, or t
  misc_feature (288)..(288): n is a, c, g, or t
  misc_feature (291)..(291): n is a, c, g, or t
  misc_feature (294)..(294): n is a, c, g, or t
  misc_feature (300)..(300): n is a, c, g, or t
  misc_feature (303)..(303): n is a, c, g, or t
  misc_feature (306)..(306): n is a, c, g, or t
  misc_feature (309)..(309): n is a, c, g, or t
  misc_feature (312)..(312): n is a, c, g, or t
  misc_feature (315)..(315): n is a, c, g, or t
  misc_feature (318)..(318): n is a, c, g, or t
  misc_feature (321)..(321): n is a, c, g, or t
  misc_feature (324)..(324): n is a, c, g, or t
  misc_feature (327)..(327): n is a, c, g, or t
  misc_feature (330)..(330): n is a, c, g, or t
  misc_feature (333)..(333): n is a, c, g, or t
  misc_feature (336)..(336): n is a, c, g, or t
  misc_feature (339)..(339): n is a, c, g, or t
  misc_feature (342)..(342): n is a, c, g, or t
  misc_feature (348)..(348): n is a, c, g, or t
  misc_feature (354)..(354): n is a, c, g, or t
  misc_feature (357)..(357): n is a, c, g, or t
  misc_feature (360)..(360): n is a, c, g, or t
  misc_feature (372)..(372): n is a, c, g, or t
  misc_feature (378)..(378): n is a, c, g, or t
  misc_feature (381)..(381): n is a, c, g, or t
  misc_feature (384)..(384): n is a, c, g, or t
  misc_feature (387)..(387): n is a, c, g, or t
  misc_feature (390)..(390): n is a, c, g, or t
  misc_feature (396)..(396): n is a, c, g, or t
  misc_feature (399)..(399): n is a, c, g, or t
  misc_feature (408)..(408): n is a, c, g, or t
  misc_feature (414)..(414): n is a, c, g, or t
  misc_feature (417)..(417): n is a, c, g, or t
  misc_feature (420)..(420): n is a, c, g, or t
  misc_feature (423)..(423): n is a, c, g, or t
  misc_feature (426)..(426): n is a, c, g, or t
  misc_feature (429)..(429): n is a, c, g, or t
  misc_feature (432)..(432): n is a, c, g, or t
  misc_feature (438)..(438): n is a, c, g, or t
  misc_feature (441)..(441): n is a, c, g, or t
  misc_feature (447)..(447): n is a, c, g, or t
  misc_feature (456)..(456): n is a, c, g, or t
  misc_feature (462)..(462): n is a, c, g, or t
  misc_feature (465)..(465): n is a, c, g, or t
  misc_feature (468)..(468): n is a, c, g, or t
  misc_feature (474)..(474): n is a, c, g, or t
  misc_feature (480)..(480): n is a, c, g, or t
  misc_feature (483)..(483): n is a, c, g, or t
  misc_feature (492)..(492): n is a, c, g, or t
  misc_feature (495)..(495): n is a, c, g, or t
  misc_feature (498)..(498): n is a, c, g, or t
  misc_feature (504)..(504): n is a, c, g, or t
  misc_feature (507)..(507): n is a, c, g, or t
  misc_feature (510)..(510): n is a, c, g, or t
  misc_feature (513)..(513): n is a, c, g, or t
  misc_feature (516)..(516): n is a, c, g, or t
  misc_feature (519)..(519): n is a, c, g, or t
  misc_feature (522)..(522): n is a, c, g, or t
  misc_feature (525)..(525): n is a, c, g, or t
  misc_feature (528)..(528): n is a, c, g, or t
  misc_feature (531)..(531): n is a, c, g, or t
  misc_feature (534)..(534): n is a, c, g, or t
  misc_feature (546)..(546): n is a, c, g, or t
  misc_feature (549)..(549): n is a, c, g, or t
  misc_feature (552)..(552): n is a, c, g, or t
  misc_feature (558)..(558): n is a, c, g, or t
  misc_feature (561)..(561): n is a, c, g, or t
  misc_feature (573)..(573): n is a, c, g, or t
  misc_feature (579)..(579): n is a, c, g, or t
  misc_feature (594)..(594): n is a, c, g, or t
  misc_feature (603)..(603): n is a, c, g, or t
  misc_feature (609)..(609): n is a, c, g, or t
  misc_feature (612)..(612): n is a, c, g, or t
  misc_feature (615)..(615): n is a, c, g, or t
  misc_feature (618)..(618): n is a, c, g, or t
  misc_feature (621)..(621): n is a, c, g, or t
  misc_feature (624)..(624): n is a, c, g, or t
  misc_feature (627)..(627): n is a, c, g, or t
  misc_feature (633)..(633): n is a, c, g, or t
  misc_feature (636)..(636): n is a, c, g, or t
  misc_feature (639)..(639): n is a, c, g, or t
  misc_feature (642)..(642): n is a, c, g, or t
  misc_feature (645)..(645): n is a, c, g, or t
  misc_feature (648)..(648): n is a, c, g, or t
  misc_feature (651)..(651): n is a, c, g, or t
  misc_feature (657)..(657): n is a, c, g, or t
  misc_feature (660)..(660): n is a, c, g, or t
  misc_feature (663)..(663): n is a, c, g, or t
  misc_feature (666)..(666): n is a, c, g, or t
  misc_feature (669)..(669): n is a, c, g, or t
  misc_feature (672)..(672): n is a, c, g, or t
  misc_feature (678)..(678): n is a, c, g, or t
  misc_feature (684)..(684): n is a, c, g, or t
  misc_feature (687)..(687): n is a, c, g, or t
  misc_feature (690)..(690): n is a, c, g, or t
  misc_feature (693)..(693): n is a, c, g, or t
  misc_feature (696)..(696): n is a, c, g, or t
  misc_feature (702)..(702): n is a, c, g, or t
  misc_feature (705)..(705): n is a, c, g, or t
  misc_feature (708)..(708): n is a, c, g, or t
  misc_feature (714)..(714): n is a, c, g, or t
  misc_feature (723)..(723): n is a, c, g, or t
  misc_feature (732)..(732): n is a, c, g, or t
  misc_feature (738)..(738): n is a, c, g, or t
  misc_feature (741)..(741): n is a, c, g, or t
  misc_feature (744)..(744): n is a, c, g, or t
  misc_feature (750)..(750): n is a, c, g, or t
  misc_feature (753)..(753): n is a, c, g, or t
  misc_feature (765)..(765): n is a, c, g, or t
  misc_feature (768)..(768): n is a, c, g, or t
  misc_feature (774)..(774): n is a, c, g, or t
  misc_feature (777)..(777): n is a, c, g, or t
  misc_feature (783)..(783): n is a, c, g, or t
  misc_feature (792)..(792): n is a, c, g, or t
  misc_feature (798)..(798): n is a, c, g, or t
  misc_feature (801)..(801): n is a, c, g, or t
  misc_feature (810)..(810): n is a, c, g, or t
  misc_feature (813)..(813): n is a, c, g, or t
  misc_feature (816)..(816): n is a, c, g, or t
  misc_feature (819)..(819): n is a, c, g, or t
  misc_feature (822)..(822): n is a, c, g, or t
  misc_feature (828)..(828): n is a, c, g, or t
  misc_feature (831)..(831): n is a, c, g, or t
  misc_feature (837)..(837): n is a, c, g, or t
  misc_feature (840)..(840): n is a, c, g, or t
  misc_feature (843)..(843): n is a, c, g, or t
  misc_feature (846)..(846): n is a, c, g, or t
  misc_feature (855)..(855): n is a, c, g, or t
  misc_feature (864)..(864): n is a, c, g, or t
  misc_feature (867)..(867): n is a, c, g, or t
  misc_feature (870)..(870): n is a, c, g, or t
  misc_feature (873)..(873): n is a, c, g, or t
  misc_feature (876)..(876): n is a, c, g, or t
  misc_feature (879)..(879): n is a, c, g, or t
  misc_feature (882)..(882): n is a, c, g, or t
  misc_feature (885)..(885): n is a, c, g, or t
  misc_feature (888)..(888): n is a, c, g, or t
  misc_feature (891)..(891): n is a, c, g, or t
  misc_feature (894)..(894): n is a, c, g, or t
  misc_feature (900)..(900): n is a, c, g, or t
  misc_feature (903)..(903): n is a, c, g, or t
  misc_feature (909)..(909): n is a, c, g, or t
  misc_feature (912)..(912): n is a, c, g, or t
  misc_feature (918)..(918): n is a, c, g, or t
  misc_feature (924)..(924): n is a, c, g, or t
  misc_feature (927)..(927): n is a, c, g, or t
  misc_feature (930)..(930): n is a, c, g, or t
  misc_feature (942)..(942): n is a, c, g, or t
  misc_feature (945)..(945): n is a, c, g, or t
  misc_feature (948)..(948): n is a, c, g, or t
  misc_feature (951)..(951): n is a, c, g, or t
  misc_feature (954)..(954): n is a, c, g, or t
  misc_feature (957)..(957): n is a, c, g, or t
  misc_feature (960)..(960): n is a, c, g, or t
  misc_feature (963)..(963): n is a, c, g, or t
  misc_feature (966)..(966): n is a, c, g, or t
  misc_feature (969)..(969): n is a, c, g, or t
  misc_feature (972)..(972): n is a, c, g, or t
  misc_feature (975)..(975): n is a, c, g, or t
  misc_feature (978)..(978): n is a, c, g, or t
  misc_feature (981)..(981): n is a, c, g, or t
  misc_feature (984)..(984): n is a, c, g, or t
  misc_feature (987)..(987): n is a, c, g, or t
  misc_feature (990)..(990): n is a, c, g, or t
  misc_feature (993)..(993): n is a, c, g, or t
  misc_feature (1008)..(1008): n is a, c, g, or t
  misc_feature (1011)..(1011): n is a, c, g, or t
  misc_feature (1020)..(1020): n is a, c, g, or t
  misc_feature (1026)..(1026): n is a, c, g, or t
  misc_feature (1029)..(1029): n is a, c, g, or t
  misc_feature (1032)..(1032): n is a, c, g, or t
  misc_feature (1035)..(1035): n is a, c, g, or t
  misc_feature (1050)..(1050): n is a, c, g, or t
  misc_feature (1053)..(1053): n is a, c, g, or t
  misc_feature (1059)..(1059): n is a, c, g, or t
  misc_feature (1062)..(1062): n is a, c, g, or t
  misc_feature (1068)..(1068): n is a, c, g, or t
  misc_feature (1071)..(1071): n is a, c, g, or t
  misc_feature (1074)..(1074): n is a, c, g, or t
  misc_feature (1077)..(1077): n is a, c, g, or t
  misc_feature (1083)..(1083): n is a, c, g, or t
  misc_feature (1089)..(1089): n is a, c, g, or t
  misc_feature (1098)..(1098): n is a, c, g, or t
  misc_feature (1101)..(1101): n is a, c, g, or t
  misc_feature (1107)..(1107): n is a, c, g, or t
  misc_feature (1116)..(1116): n is a, c, g, or t
  misc_feature (1119)..(1119): n is a, c, g, or t
  misc_feature (1125)..(1125): n is a, c, g, or t
  misc_feature (1128)..(1128): n is a, c, g, or t
  misc_feature (1131)..(1131): n is a, c, g, or t
  misc_feature (1134)..(1134): n is a, c, g, or t
  misc_feature (1137)..(1137): n is a, c, g, or t
  misc_feature (1143)..(1143): n is a, c, g, or t
  misc_feature (1152)..(1152): n is a, c, g, or t
  misc_feature (1161)..(1161): n is a, c, g, or t
  misc_feature (1164)..(1164): n is a, c, g, or t
  misc_feature (1170)..(1170): n is a, c, g, or t
  misc_feature (1173)..(1173): n is a, c, g, or t
  misc_feature (1176)..(1176): n is a, c, g, or t
  misc_feature (1179)..(1179): n is a, c, g, or t
  misc_feature (1182)..(1182): n is a, c, g, or t
  misc_feature (1185)..(1185): n is a, c, g, or t
  misc_feature (1188)..(1188): n is a, c, g, or t
  misc_feature (1194)..(1194): n is a, c, g, or t
  misc_feature (1197)..(1197): n is a, c, g, or t
  misc_feature (1203)..(1203): n is a, c, g, or t
  misc_feature (1206)..(1206): n is a, c, g, or t
  misc_feature (1215)..(1215): n is a, c, g, or t
  misc_feature (1224)..(1224): n is a, c, g, or t
  misc_feature (1230)..(1230): n is a, c, g, or t
  misc_feature (1239)..(1239): n is a, c, g, or t
  misc_feature (1248)..(1248): n is a, c, g, or t
  misc_feature (1257)..(1257): n is a, c, g, or t
  misc_feature (1266)..(1266): n is a, c, g, or t
  misc_feature (1275)..(1275): n is a, c, g, or t
  misc_feature (1287)..(1287): n is a, c, g, or t
  misc_feature (1290)..(1290): n is a, c, g, or t
  misc_feature (1296)..(1296): n is a, c, g, or t
  misc_feature (1302)..(1302): n is a, c, g, or t
  misc_feature (1305)..(1305): n is a, c, g, or t
  misc_feature (1308)..(1308): n is a, c, g, or t
  misc_feature (1311)..(1311): n is a, c, g, or t
  misc_feature (1314)..(1314): n is a, c, g, or t
  misc_feature (1317)..(1317): n is a, c, g, or t
  misc_feature (1320)..(1320): n is a, c, g, or t
  misc_feature (1323)..(1323): n is a, c, g, or t
  misc_feature (1329)..(1329): n is a, c, g, or t
  misc_feature (1332)..(1332): n is a, c, g, or t
  misc_feature (1335)..(1335): n is a, c, g, or t
  misc_feature (1338)..(1338): n is a, c, g, or t
  misc_feature (1341)..(1341): n is a, c, g, or t
  misc_feature (1350)..(1350): n is a, c, g, or t
  misc_feature (1356)..(1356): n is a, c, g, or t
  misc_feature (1359)..(1359): n is a, c, g, or t
  misc_feature (1362)..(1362): n is a, c, g, or t
  misc_feature (1365)..(1365): n is a, c, g, or t
  misc_feature (1368)..(1368): n is a, c, g, or t
  misc_feature (1374)..(1374): n is a, c, g, or t
  misc_feature (1377)..(1377): n is a, c, g, or t
  misc_feature (1380)..(1380): n is a, c, g, or t
  misc_feature (1383)..(1383): n is a, c, g, or t
  misc_feature (1386)..(1386): n is a, c, g, or t
  misc_feature (1389)..(1389): n is a, c, g, or t
  misc_feature (1392)..(1392): n is a, c, g, or t
  misc_feature (1395)..(1395): n is a, c, g, or t
  misc_feature (1398)..(1398): n is a, c, g, or t
  misc_feature (1401)..(1401): n is a, c, g, or t
  misc_feature (1404)..(1404): n is a, c, g, or t
  misc_feature (1407)..(1407): n is a, c, g, or t
  misc_feature (1410)..(1410): n is a, c, g, or t
  misc_feature (1416)..(1416): n is a, c, g, or t
  misc_feature (1419)..(1419): n is a, c, g, or t
  misc_feature (1422)..(1422): n is a, c, g, or t
  misc_feature (1425)..(1425): n is a, c, g, or t
  misc_feature (1431)..(1431): n is a, c, g, or t
  misc_feature (1434)..(1434): n is a, c, g, or t
  misc_feature (1437)..(1437): n is a, c, g, or t
  misc_feature (1440)..(1440): n is a, c, g, or t
  misc_feature (1443)..(1443): n is a, c, g, or t
  misc_feature (1446)..(1446): n is a, c, g, or t
  misc_feature (1449)..(1449): n is a, c, g, or t
  misc_feature (1452)..(1452): n is a, c, g, or t
  misc_feature (1455)..(1455): n is a, c, g, or t
  misc_feature (1458)..(1458): n is a, c, g, or t
  misc_feature (1461)..(1461): n is a, c, g, or t
  misc_feature (1464)..(1464): n is a, c, g, or t
  misc_feature (1467)..(1467): n is a, c, g, or t
  misc_feature (1470)..(1470): n is a, c, g, or t
  misc_feature (1476)..(1476): n is a, c, g, or t
  misc_feature (1479)..(1479): n is a, c, g, or t
  misc_feature (1482)..(1482): n is a, c, g, or t
  misc_feature (1485)..(1485): n is a, c, g, or t
  misc_feature (1488)..(1488): n is a, c, g, or t
  misc_feature (1491)..(1491): n is a, c, g, or t
  misc_feature (1494)..(1494): n is a, c, g, or t
  misc_feature (1497)..(1497): n is a, c, g, or t
  misc_feature (1500)..(1500): n is a, c, g, or t
  misc_feature (1503)..(1503): n is a, c, g, or t
  misc_feature (1506)..(1506): n is a, c, g, or t
  misc_feature (1509)..(1509): n is a, c, g, or t
  misc_feature (1512)..(1512): n is a, c, g, or t
  misc_feature (1515)..(1515): n is a, c, g, or t
  misc_feature (1518)..(1518): n is a, c, g, or t
  misc_feature (1524)..(1524): n is a, c, g, or t
  misc_feature (1527)..(1527): n is a, c, g, or t
  misc_feature (1530)..(1530): n is a, c, g, or t
  misc_feature (1533)..(1533): n is a, c, g, or t
  misc_feature (1536)..(1536): n is a, c, g, or t
  misc_feature (1539)..(1539): n is a, c, g, or t
  misc_feature (1542)..(1542): n is a, c, g, or t
ggnccnccnggnccnccnggnccnccnggnytnccnggnathccnggnaarccnggnacngaygtnttyatgggnccnccnggnwsnccnggngargayggnccngcnggngarccnggnccnccnggnccngarggncarccnggngtngayggngcnacnggnytnccnggnatgaarggngaraarggngcnmgnggnccnaayggnwsngtnggngaraarggngayccnggnaaymgnggnytnccnggnccnccnggnaaraarggncargcnggnccnccnggngtnatgggnccnccnggnccnccnggnccnccnggnccnccnggnccnggntgyacnatgggnytnggnttygargayacngarggnwsnggnwsnacncarytnytnaaygarccnaarytnwsnmgnccnacngcngcnathggnytnaarggngaraarggngaymgnggnccnaarggngarmgnggnatggayggngcnwsnathgtnggnccnccnggnccnmgnggnccnccnggncayathaargtnytnwsnaaywsnytnathaayathacncayggnttyatgaayttywsngayathccngarytngtnggnccnccnggnccngayggnytnccnggnytnccnggnttyccnggnccnmgnggnccnaarggngayacnggnytnccnggnttyccnggnytnaarggngarcarggngaraarggngarccnggngcnathytnacngargayathccnytngarmgnytnatgggnaaraarggngarccnggnatgcayggngcnccnggnccnatgggnccnaarggnccnccnggncayaarggngarttyggnytnccnggnmgnccnggnmgnccnggnytnaayggnytnaarggnacnaarggngayccnggngtnathatgcarggnccnccnggnytnccnggnccnccnggnccnccnggnccnccnggngcngtnathaayathaarggngcnathttyccnathccngtnmgnccncaytgyaaratgccngtngayacngcncayccnggnwsnccngarytnathacnttycayggngtnaarggngaraarggnwsntggggnytnccnggnwsnaarggngaraarggngaycarggngcncarggnccnccnggnccnccnytngayytngcntayytnmgncayttyytnaayaayytnaarggngaraayggngayaarggnttyaarggngaraarggngaraarggngayathaayggnwsnttyytnatgwsnggnccnccnggnytnccnggnaayccnggnccngcnggncaraarggngaracngtngtnggnccncarggnccnccnggngcnccnggnytnccnggnccnccnggnttyggnmgnccnggngayccnggnccnccnggnccnccnggnccnccnggnccnccngcnathytnggngcngcngtngcnytnccnggnccnccnggnccnccnggncarccnggnytnccnggnwsnmgn

SEQ ID NO: 1131 - DNA, 3612 bp, Artificial Sequence
  hCol-CNA36 (alpha1(XVI) THD)
  misc_feature (3)..(3): n is a, c, g, or t
  misc_feature (6)..(6): n is a, c, g, or t
  misc_feature (12)..(12): n is a, c, g, or t
  misc_feature (21)..(21): n is a, c, g, or t
  misc_feature (27)..(27): n is a, c, g, or t
  misc_feature (30)..(30): n is a, c, g, or t
  misc_feature (33)..(33): n is a, c, g, or t
  misc_feature (36)..(36): n is a, c, g, or t
  misc_feature (39)..(39): n is a, c, g, or t
  misc_feature (42)..(42): n is a, c, g, or t
  misc_feature (45)..(45): n is a, c, g, or t
  misc_feature (48)..(48): n is a, c, g, or t
  misc_feature (51)..(51): n is a, c, g, or t
  misc_feature (54)..(54): n is a, c, g, or t
  misc_feature (57)..(57): n is a, c, g, or t
  misc_feature (60)..(60): n is a, c, g, or t
  misc_feature (63)..(63): n is a, c, g, or t
  misc_feature (66)..(66): n is a, c, g, or t
  misc_feature (75)..(75): n is a, c, g, or t
  misc_feature (84)..(84): n is a, c, g, or t
  misc_feature (93)..(93): n is a, c, g, or t
  misc_feature (99)..(99): n is a, c, g, or t
  misc_feature (102)..(102): n is a, c, g, or t
  misc_feature (111)..(111): n is a, c, g, or t
  misc_feature (114)..(114): n is a, c, g, or t
  misc_feature (117)..(117): n is a, c, g, or t
  misc_feature (120)..(120): n is a, c, g, or t
  misc_feature (126)..(126): n is a, c, g, or t
  misc_feature (129)..(129): n is a, c, g, or t
  misc_feature (132)..(132): n is a, c, g, or t
  misc_feature (138)..(138): n is a, c, g, or t
  misc_feature (141)..(141): n is a, c, g, or t
  misc_feature (144)..(144): n is a, c, g, or t
  misc_feature (147)..(147): n is a, c, g, or t
  misc_feature (159)..(159): n is a, c, g, or t
  misc_feature (165)..(165): n is a, c, g, or t
  misc_feature (168)..(168): n is a, c, g, or t
  misc_feature (174)..(174): n is a, c, g, or t
  misc_feature (183)..(183): n is a, c, g, or t
  misc_feature (189)..(189): n is a, c, g, or t
  misc_feature (192)..(192): n is a, c, g, or t
  misc_feature (198)..(198): n is a, c, g, or t
  misc_feature (201)..(201): n is a, c, g, or t
  misc_feature (204)..(204): n is a, c, g, or t
  misc_feature (210)..(210): n is a, c, g, or t
  misc_feature (213)..(213): n is a, c, g, or t
  misc_feature (216)..(216): n is a, c, g, or t
  misc_feature (219)..(219): n is a, c, g, or t
  misc_feature (225)..(225): n is a, c, g, or t
  misc_feature (228)..(228): n is a, c, g, or t
  misc_feature (231)..(231): n is a, c, g, or t
  misc_feature (234)..(234): n is a, c, g, or t
  misc_feature (237)..(237): n is a, c, g, or t
  misc_feature (240)..(240): n is a, c, g, or t
  misc_feature (243)..(243): n is a, c, g, or t
  misc_feature (246)..(246): n is a, c, g, or t
  misc_feature (249)..(249): n is a, c, g, or t
  misc_feature (252)..(252): n is a, c, g, or t
  misc_feature (255)..(255): n is a, c, g, or t
  misc_feature (261)..(261): n is a, c, g, or t
  misc_feature (264)..(264): n is a, c, g, or t
  misc_feature (267)..(267): n is a, c, g, or t
  misc_feature (270)..(270): n is a, c, g, or t
  misc_feature (273)..(273): n is a, c, g, or t
  misc_feature (276)..(276): n is a, c, g, or t
  misc_feature (279)..(279): n is a, c, g, or t
  misc_feature (285)..(285): n is a, c, g, or t
  misc_feature (288)..(288): n is a, c, g, or t
  misc_feature (291)..(291): n is a, c, g, or t
  misc_feature (294)..(294): n is a, c, g, or t
  misc_feature (297)..(297): n is a, c, g, or t
  misc_feature (300)..(300): n is a, c, g, or t
  misc_feature (303)..(303): n is a, c, g, or t
  misc_feature (309)..(309): n is a, c, g, or t
  misc_feature (318)..(318): n is a, c, g, or t
  misc_feature (321)..(321): n is a, c, g, or t
  misc_feature (324)..(324): n is a, c, g, or t
  misc_feature (327)..(327): n is a, c, g, or t
  misc_feature (333)..(333): n is a, c, g, or t
  misc_feature (336)..(336): n is a, c, g, or t
  misc_feature (345)..(345): n is a, c, g, or t
  misc_feature (348)..(348): n is a, c, g, or t
  misc_feature (351)..(351): n is a, c, g, or t
  misc_feature (354)..(354): n is a, c, g, or t
  misc_feature (360)..(360): n is a, c, g, or t
  misc_feature (363)..(363): n is a, c, g, or t
  misc_feature (369)..(369): n is a, c, g, or t
  misc_feature (372)..(372): n is a, c, g, or t
  misc_feature (375)..(375): n is a, c, g, or t
  misc_feature (381)..(381): n is a, c, g, or t
  misc_feature (390)..(390): n is a, c, g, or t
  misc_feature (396)..(396): n is a, c, g, or t
  misc_feature (405)..(405): n is a, c, g, or t
  misc_feature (411)..(411): n is a, c, g, or t
  misc_feature (414)..(414): n is a, c, g, or t
  misc_feature (417)..(417): n is a, c, g, or t
  misc_feature (420)..(420): n is a, c, g, or t
  misc_feature (426)..(426): n is a, c, g, or t
  misc_feature (441)..(441): n is a, c, g, or t
  misc_feature (444)..(444): n is a, c, g, or t
  misc_feature (447)..(447): n is a, c, g, or t
  misc_feature (450)..(450): n is a, c, g, or t
  misc_feature (453)..(453): n is a, c, g, or t
  misc_feature (459)..(459): n is a, c, g, or t
  misc_feature (462)..(462): n is a, c, g, or t
  misc_feature (465)..(465): n is a, c, g, or t
  misc_feature (471)..(471): n is a, c, g, or t
  misc_feature (477)..(477): n is a, c, g, or t
  misc_feature (480)..(480): n is a, c, g, or t
  misc_feature (486)..(486): n is a, c, g, or t
  misc_feature (489)..(489): n is a, c, g, or t
  misc_feature (492)..(492): n is a, c, g, or t
  misc_feature (495)..(495): n is a, c, g, or t
  misc_feature (498)..(498): n is a, c, g, or t
  misc_feature (501)..(501): n is a, c, g, or t
  misc_feature (507)..(507): n is a, c, g, or t
  misc_feature (510)..(510): n is a, c, g, or t
  misc_feature (519)..(519): n is a, c, g, or t
  misc_feature (528)..(528): n is a, c, g, or t
  misc_feature (537)..(537): n is a, c, g, or t
  misc_feature (543)..(543): n is a, c, g, or t
  misc_feature (549)..(549): n is a, c, g, or t
  misc_feature (552)..(552): n is a, c, g, or t
  misc_feature (558)..(558): n is a, c, g, or t
  misc_feature (561)..(561): n is a, c, g, or t
  misc_feature (564)..(564): n is a, c, g, or t
  misc_feature (567)..(567): n is a, c, g, or t
  misc_feature (570)..(570): n is a, c, g, or t
  misc_feature (573)..(573): n is a, c, g, or t
  misc_feature (582)..(582): n is a, c, g, or t
  misc_feature (585)..(585): n is a, c, g, or t
  misc_feature (588)..(588): n is a, c, g, or t
  misc_feature (591)..(591): n is a, c, g, or t
  misc_feature (594)..(594): n is a, c, g, or t
  misc_feature (597)..(597): n is a, c, g, or t
  misc_feature (600)..(600): n is a, c, g, or t
  misc_feature (603)..(603): n is a, c, g, or t
  misc_feature (606)..(606): n is a, c, g, or t
  misc_feature (612)..(612): n is a, c, g, or t
  misc_feature (615)..(615): n is a, c, g, or t
  misc_feature (618)..(618): n is a, c, g, or t
  misc_feature (621)..(621): n is a, c, g, or t
  misc_feature (624)..(624): n is a, c, g, or t
  misc_feature (630)..(630): n is a, c, g, or t
  misc_feature (633)..(633): n is a, c, g, or t
  misc_feature (636)..(636): n is a, c, g, or t
  misc_feature (639)..(639): n is a, c, g, or t
  misc_feature (642)..(642): n is a, c, g, or t
  misc_feature (645)..(645): n is a, c, g, or t
  misc_feature (648)..(648): n is a, c, g, or t
  misc_feature (651)..(651): n is a, c, g, or t
  misc_feature (654)..(654): n is a, c, g, or t
  misc_feature (657)..(657): n is a, c, g, or t
  misc_feature (660)..(660): n is a, c, g, or t
  misc_feature (663)..(663): n is a, c, g, or t
  misc_feature (666)..(666): n is a, c, g, or t
  misc_feature (669)..(669): n is a, c, g, or t
  misc_feature (675)..(675): n is a, c, g, or t
  misc_feature (684)..(684): n is a, c, g, or t
  misc_feature (693)..(693): n is a, c, g, or t
  misc_feature (699)..(699): n is a, c, g, or t
  misc_feature (702)..(702): n is a, c, g, or t
  misc_feature (705)..(705): n is a, c, g, or t
  misc_feature (708)..(708): n is a, c, g, or t
  misc_feature (711)..(711): n is a, c, g, or t
  misc_feature (714)..(714): n is a, c, g, or t
  misc_feature (717)..(717): n is a, c, g, or t
  misc_feature (720)..(720): n is a, c, g, or t
  misc_feature (723)..(723): n is a, c, g, or t
  misc_feature (726)..(726): n is a, c, g, or t
  misc_feature (729)..(729): n is a, c, g, or t
  misc_feature (732)..(732): n is a, c, g, or t
  misc_feature (735)..(735): n is a, c, g, or t
  misc_feature (738)..(738): n is a, c, g, or t
  misc_feature (741)..(741): n is a, c, g, or t
  misc_feature (744)..(744): n is a, c, g, or t
  misc_feature (747)..(747): n is a, c, g, or t
  misc_feature (756)..(756): n is a, c, g, or t
  misc_feature (759)..(759): n is a, c, g, or t
  misc_feature (765)..(765): n is a, c, g, or t
  misc_feature (771)..(771): n is a, c, g, or t
  misc_feature (780)..(780): n is a, c, g, or t
  misc_feature (786)..(786): n is a, c, g, or t
  misc_feature (789)..(789): n is a, c, g, or t
  misc_feature (792)..(792): n is a, c, g, or t
  misc_feature (795)..(795): n is a, c, g, or t
  misc_feature (801)..(801): n is a, c, g, or t
  misc_feature (810)..(810): n is a, c, g, or t
  misc_feature (816)..(816): n is a, c, g, or t
  misc_feature (819)..(819): n is a, c, g, or t
  misc_feature (822)..(822): n is a, c, g, or t
  misc_feature (825)..(825): n is a, c, g, or t
  misc_feature (828)..(828): n is a, c, g, or t
  misc_feature (831)..(831): n is a, c, g, or t
  misc_feature (834)..(834): n is a, c, g, or t
  misc_feature (837)..(837): n is a, c, g, or t
  misc_feature (840)..(840): n is a, c, g, or t
  misc_feature (843)..(843): n is a, c, g, or t
  misc_feature (846)..(846): n is a, c, g, or t
  misc_feature (855)..(855): n is a, c, g, or t
  misc_feature (861)..(861): n is a, c, g, or t
  misc_feature (864)..(864): n is a, c, g, or t
  misc_feature (867)..(867): n is a, c, g, or t
  misc_feature (870)..(870): n is a, c, g, or t
  misc_feature (873)..(873): n is a, c, g, or t
  misc_feature (879)..(879): n is a, c, g, or t
  misc_feature (882)..(882): n is a, c, g, or t
  misc_feature (885)..(885): n is a, c, g, or t
  misc_feature (888)..(888): n is a, c, g, or t
  misc_feature (897)..(897): n is a, c, g, or t
  misc_feature (903)..(903): n is a, c, g, or t
  misc_feature (906)..(906): n is a, c, g, or t
  misc_feature (912)..(912): n is a, c, g, or t
  misc_feature (915)..(915): n is a, c, g, or t
  misc_feature (918)..(918): n is a, c, g, or t
  misc_feature (924)..(924): n is a, c, g, or t
  misc_feature (933)..(933): n is a, c, g, or t
  misc_feature (939)..(939): n is a, c, g, or t
  misc_feature (942)..(942): n is a, c, g, or t
  misc_feature (948)..(948): n is a, c, g, or t
  misc_feature (951)..(951): n is a, c, g, or t
  misc_feature (957)..(957): n is a, c, g, or t
  misc_feature (960)..(960): n is a, c, g, or t
  misc_feature (963)..(963): n is a, c, g, or t
  misc_feature (966)..(966): n is a, c, g, or t
  misc_feature (969)..(969): n is a, c, g, or t
  misc_feature (972)..(972): n is a, c, g, or t
  misc_feature (975)..(975): n is a, c, g, or t
  misc_feature (978)..(978): n is a, c, g, or t
  misc_feature (981)..(981): n is a, c, g, or t
  misc_feature (984)..(984): n is a, c, g, or t
  misc_feature (987)..(987): n is a, c, g, or t
  misc_feature (990)..(990): n is a, c, g, or t
  misc_feature (993)..(993): n is a, c, g, or t
  misc_feature (996)..(996): n is a, c, g, or t
  misc_feature (1002)..(1002): n is a, c, g, or t
  misc_feature (1005)..(1005): n is a, c, g, or t
  misc_feature (1008)..(1008): n is a, c, g, or t
  misc_feature (1014)..(1014): n is a, c, g, or t
  misc_feature (1017)..(1017): n is a, c, g, or t
  misc_feature (1020)..(1020): n is a, c, g, or t
  misc_feature (1023)..(1023): n is a, c, g, or t
  misc_feature (1026)..(1026): n is a, c, g, or t
  misc_feature (1032)..(1032): n is a, c, g, or t
  misc_feature (1041)..(1041): n is a, c, g, or t
  misc_feature (1047)..(1047): n is a, c, g, or t
  misc_feature (1053)..(1053): n is a, c, g, or t
  misc_feature (1056)..(1056): n is a, c, g, or t
  misc_feature (1062)..(1062): n is a, c, g, or t
  misc_feature (1065)..(1065): n is a, c, g, or t
  misc_feature (1068)..(1068): n is a, c, g, or t
  misc_feature (1074)..(1074): n is a, c, g, or t
  misc_feature (1077)..(1077): n is a, c, g, or t
  misc_feature (1080)..(1080): n is a, c, g, or t
  misc_feature (1083)..(1083): n is a, c, g, or t
  misc_feature (1092)..(1092): n is a, c, g, or t
  misc_feature (1095)..(1095): n is a, c, g, or t
  misc_feature (1098)..(1098): n is a, c, g, or t
  misc_feature (1101)..(1101): n is a, c, g, or t
  misc_feature (1104)..(1104): n is a, c, g, or t
  misc_feature (1110)..(1110): n is a, c, g, or t
  misc_feature (1113)..(1113): n is a, c, g, or t
  misc_feature (1116)..(1116): n is a, c, g, or t
  misc_feature (1122)..(1122): n is a, c, g, or t
  misc_feature (1131)..(1131): n is a, c, g, or t
  misc_feature (1134)..(1134): n is a, c, g, or t
  misc_feature (1140)..(1140): n is a, c, g, or t
  misc_feature (1143)..(1143): n is a, c, g, or t
  misc_feature (1146)..(1146): n is a, c, g, or t
  misc_feature (1149)..(1149): n is a, c, g, or t
  misc_feature (1152)..(1152): n is a, c, g, or t
  misc_feature (1155)..(1155): n is a, c, g, or t
  misc_feature (1161)..(1161): n is a, c, g, or t
  misc_feature (1164)..(1164): n is a, c, g, or t
  misc_feature (1170)..(1170): n is a, c, g, or t
  misc_feature (1173)..(1173): n is a, c, g, or t
  misc_feature (1176)..(1176): n is a, c, g, or t
  misc_feature (1179)..(1179): n is a, c, g, or t
  misc_feature (1182)..(1182): n is a, c, g, or t
  misc_feature (1185)..(1185): n is a, c, g, or t
  misc_feature (1191)..(1191): n is a, c, g, or t
  misc_feature (1194)..(1194): n is a, c, g, or t
  misc_feature (1197)..(1197): n is a, c, g, or t
  misc_feature (1200)..(1200): n is a, c, g, or t
  misc_feature (1203)..(1203): n is a, c, g, or t
  misc_feature (1209)..(1209): n is a, c, g, or t
  misc_feature (1212)..(1212): n is a, c, g, or t
  misc_feature (1218)..(1218): n is a, c, g, or t
  misc_feature (1224)..(1224): n is a, c, g, or t
  misc_feature (1227)..(1227): n is a, c, g, or t
  misc_feature (1230)..(1230): n is a, c, g, or t
  misc_feature (1233)..(1233): n is a, c, g, or t
  misc_feature (1236)..(1236): n is a, c, g, or t
  misc_feature (1239)..(1239): n is a, c, g, or t
  misc_feature (1242)..(1242): n is a, c, g, or t
  misc_feature (1245)..(1245): n is a, c, g, or t
  misc_feature (1251)..(1251): n is a, c, g, or t
  misc_feature (1254)..(1254): n is a, c, g, or t
  misc_feature (1260)..(1260): n is a, c, g, or t
  misc_feature (1266)..(1266): n is a, c, g, or t
  misc_feature (1269)..(1269): n is a, c, g, or t
  misc_feature (1272)..(1272): n is a, c, g, or t
  misc_feature (1275)..(1275): n is a, c, g, or t
  misc_feature (1278)..(1278): n is a, c, g, or t
  misc_feature (1281)..(1281): n is a, c, g, or t
  misc_feature (1284)..(1284): n is a, c, g, or t
  misc_feature (1287)..(1287): n is a, c, g, or t
  misc_feature (1296)..(1296): n is a, c, g, or t
  misc_feature (1299)..(1299): n is a, c, g, or t
  misc_feature (1302)..(1302): n is a, c, g, or t
  misc_feature (1305)..(1305): n is a, c, g, or t
  misc_feature (1308)..(1308): n is a, c, g, or t
  misc_feature (1311)..(1311): n is a, c, g, or t
  misc_feature (1314)..(1314): n is a, c, g, or t
  misc_feature (1317)..(1317): n is a, c, g, or t
  misc_feature (1320)..(1320): n is a, c, g, or t
  misc_feature (1323)..(1323): n is a, c, g, or t
  misc_feature (1326)..(1326): n is a, c, g, or t
  misc_feature (1329)..(1329): n is a, c, g, or t
  misc_feature (1332)..(1332): n is a, c, g, or t
  misc_feature (1341)..(1341): n is a, c, g, or t
  misc_feature (1344)..(1344): n is a, c, g, or t
  misc_feature (1350)..(1350): n is a, c, g, or t
  misc_feature (1353)..(1353): n is a, c, g, or t
  misc_feature (1356)..(1356): n is a, c, g, or t
  misc_feature (1359)..(1359): n is a, c, g, or t
  misc_feature (1362)..(1362): n is a, c, g, or t
  misc_feature (1368)..(1368): n is a, c, g, or t
  misc_feature (1371)..(1371): n is a, c, g, or t
  misc_feature (1374)..(1374): n is a, c, g, or t
  misc_feature (1377)..(1377): n is a, c, g, or t
  misc_feature (1380)..(1380): n is a, c, g, or t
  misc_feature (1383)..(1383): n is a, c, g, or t
  misc_feature (1386)..(1386): n is a, c, g, or t
  misc_feature (1389)..(1389): n is a, c, g, or t
  misc_feature (1392)..(1392): n is a, c, g, or t
  misc_feature (1395)..(1395): n is a, c, g, or t
  misc_feature (1398)..(1398): n is a, c, g, or t
  misc_feature (1401)..(1401): n is a, c, g, or t
  misc_feature (1404)..(1404): n is a, c, g, or t
  misc_feature (1407)..(1407): n is a, c, g, or t
  misc_feature (1410)..(1410): n is a, c, g, or t
  misc_feature (1413)..(1413): n is a, c, g, or t
  misc_feature (1416)..(1416): n is a, c, g, or t
  misc_feature (1419)..(1419): n is a, c, g, or t
  misc_feature (1422)..(1422): n is a, c, g, or t
  misc_feature (1428)..(1428): n is a, c, g, or t
  misc_feature (1437)..(1437): n is a, c, g, or t
  misc_feature (1443)..(1443): n is a, c, g, or t
  misc_feature (1446)..(1446): n is a, c, g, or t
  misc_feature (1449)..(1449): n is a, c, g, or t
  misc_feature (1452)..(1452): n is a, c, g, or t
  misc_feature (1455)..(1455): n is a, c, g, or t
  misc_feature (1458)..(1458): n is a, c, g, or t
  misc_feature (1461)..(1461): n is a, c, g, or t
  misc_feature (1464)..(1464): n is a, c, g, or t
  misc_feature (1473)..(1473): n is a, c, g, or t
  misc_feature (1476)..(1476): n is a, c, g, or t
  misc_feature (1479)..(1479): n is a, c, g, or t
  misc_feature (1482)..(1482): n is a, c, g, or t
  misc_feature (1491)..(1491): n is a, c, g, or t
  misc_feature (1497)..(1497): n is a, c, g, or t
  misc_feature (1500)..(1500): n is a, c, g, or t
  misc_feature (1509)..(1509): n is a, c, g, or t
  misc_feature (1515)..(1515): n is a, c, g, or t
  misc_feature (1518)..(1518): n is a, c, g, or t
  misc_feature (1524)..(1524): n is a, c, g, or t
  misc_feature (1530)..(1530): n is a, c, g, or t
  misc_feature (1539)..(1539): n is a, c, g, or t
  misc_feature (1542)..(1542): n is a, c, g, or t
  misc_feature (1548)..(1548): n is a, c, g, or t
  misc_feature (1551)..(1551): n is a, c, g, or t
  misc_feature (1554)..(1554): n is a, c, g, or t
  misc_feature (1557)..(1557): n is a, c, g, or t
  misc_feature (1560)..(1560): n is a, c, g, or t
  misc_feature (1563)..(1563): n is a, c, g, or t
  misc_feature (1572)..(1572): n is a, c, g, or t
  misc_feature (1575)..(1575): n is a, c, g, or t
  misc_feature (1578)..(1578): n is a, c, g, or t
  misc_feature (1587)..(1587): n is a, c, g, or t
  misc_feature (1590)..(1590): n is a, c, g, or t
  misc_feature (1593)..(1593): n is a, c, g, or t
  misc_feature (1599)..(1599): n is a, c, g, or t
  misc_feature (1602)..(1602): n is a, c, g, or t
  misc_feature (1605)..(1605): n is a, c, g, or t
  misc_feature (1608)..(1608): n is a, c, g, or t
  misc_feature (1614)..(1614): n is a, c, g, or t
  misc_feature (1617)..(1617): n is a, c, g, or t
  misc_feature (1620)..(1620): n is a, c, g, or t
  misc_feature (1623)..(1623): n is a, c, g, or t
  misc_feature (1626)..(1626): n is a, c, g, or t
  misc_feature (1629)..(1629): n is a, c, g, or t
  misc_feature (1632)..(1632): n is a, c, g, or t
  misc_feature (1635)..(1635): n is a, c, g, or t
  misc_feature (1638)..(1638): n is a, c, g, or t
  misc_feature (1641)..(1641): n is a, c, g, or t
  misc_feature (1644)..(1644): n is a, c, g, or t
  misc_feature (1647)..(1647): n is a, c, g, or t
  misc_feature (1653)..(1653): n is a, c, g, or t
  misc_feature (1656)..(1656): n is a, c, g, or t
  misc_feature (1659)..(1659): n is a, c, g, or t
  misc_feature (1662)..(1662): n is a, c, g, or t
  misc_feature (1671)..(1671): n is a, c, g, or t
  misc_feature (1674)..(1674): n is a, c, g, or t
  misc_feature (1677)..(1677): n is a, c, g, or t
  misc_feature (1680)..(1680): n is a, c, g, or t
  misc_feature (1686)..(1686): n is a, c, g, or t
  misc_feature (1689)..(1689): n is a, c, g, or t
  misc_feature (1692)..(1692): n is a, c, g, or t
  misc_feature (1695)..(1695): n is a, c, g, or t
  misc_feature (1698)..(1698): n is a, c, g, or t
  misc_feature (1704)..(1704): n is a, c, g, or t
  misc_feature (1707)..(1707): n is a, c, g, or t
  misc_feature (1710)..(1710): n is a, c, g, or t
  misc_feature (1713)..(1713): n is a, c, g, or t
  misc_feature (1716)..(1716): n is a, c, g, or t
  misc_feature (1731)..(1731): n is a, c, g, or t
  misc_feature (1734)..(1734): n is a, c, g, or t
  misc_feature (1740)..(1740): n is a, c, g, or t
  misc_feature (1749)..(1749): n is a, c, g, or t
  misc_feature (1758)..(1758): n is a, c, g, or t
  misc_feature (1764)..(1764): n is a, c, g, or t
  misc_feature (1770)..(1770): n is a, c, g, or t
  misc_feature (1773)..(1773): n is a, c, g, or t
  misc_feature (1779)..(1779): n is a, c, g, or t
  misc_feature (1782)..(1782): n is a, c, g, or t
  misc_feature (1788)..(1788): n is a, c, g, or t
  misc_feature (1791)..(1791): n is a, c, g, or t
  misc_feature (1800)..(1800): n is a, c, g, or t
  misc_feature (1809)..(1809): n is a, c, g, or t
  misc_feature (1818)..(1818): n is a, c, g, or t
  misc_feature (1824)..(1824): n is a, c, g, or t
  misc_feature (1827)..(1827): n is a, c, g, or t
  misc_feature (1830)..(1830): n is a, c, g, or t
  misc_feature (1833)..(1833): n is a, c, g, or t
  misc_feature (1836)..(1836): n is a, c, g, or t
  misc_feature (1839)..(1839): n is a, c, g, or t
  misc_feature (1851)..(1851): n is a, c, g, or t
  misc_feature (1863)..(1863): n is a, c, g, or t
  misc_feature (1866)..(1866): n is a, c, g, or t
  misc_feature (1869)..(1869): n is a, c, g, or t
  misc_feature (1875)..(1875): n is a, c, g, or t
  misc_feature (1878)..(1878): n is a, c, g, or t
  misc_feature (1881)..(1881): n is a, c, g, or t
  misc_feature (1884)..(1884): n is a, c, g, or t
  misc_feature (1893)..(1893): n is a, c, g, or t
  misc_feature (1896)..(1896): n is a, c, g, or t
  misc_feature (1899)..(1899): n is a, c, g, or t
  misc_feature (1908)..(1908): n is a, c, g, or t
  misc_feature (1914)..(1914): n is a, c, g, or t
  misc_feature (1920)..(1920): n is a, c, g, or t
  misc_feature (1923)..(1923): n is a, c, g, or t
  misc_feature (1929)..(1929): n is a, c, g, or t
  misc_feature (1932)..(1932): n is a, c, g, or t
  misc_feature (1935)..(1935): n is a, c, g, or t
  misc_feature (1938)..(1938): n is a, c, g, or t
  misc_feature (1941)..(1941): n is a, c, g, or t
  misc_feature (1944)..(1944): n is a, c, g, or t
  misc_feature (1947)..(1947): n is a, c, g, or t
  misc_feature (1950)..(1950): n is a, c, g, or t
  misc_feature (1953)..(1953): n is a, c, g, or t
  misc_feature (1956)..(1956): n is a, c, g, or t
  misc_feature (1959)..(1959): n is a, c, g, or t
  misc_feature (1962)..(1962): n is a, c, g, or t
  misc_feature (1965)..(1965): n is a, c, g, or t
  misc_feature (1968)..(1968): n is a, c, g, or t
  misc_feature (1974)..(1974): n is a, c, g, or t
  misc_feature (1977)..(1977): n is a, c, g, or t
  misc_feature (1986)..(1986): n is a, c, g, or t
  misc_feature (1989)..(1989): n is a, c, g, or t
  misc_feature (1992)..(1992): n is a, c, g, or t
  misc_feature (1995)..(1995): n is a, c, g, or t
  misc_feature (2001)..(2001): n is a, c, g, or t
  misc_feature (2004)..(2004): n is a, c, g, or t
  misc_feature (2007)..(2007): n is a, c, g, or t
  misc_feature (2010)..(2010): n is a, c, g, or t
  misc_feature (2013)..(2013): n is a, c, g, or t
  misc_feature (2016)..(2016): n is a, c, g, or t
  misc_feature (2019)..(2019): n is a, c, g, or t
  misc_feature (2022)..(2022): n is a, c, g, or t
  misc_feature (2025)..(2025): n is a, c, g, or t
  misc_feature (2031)..(2031): n is a, c, g, or t
  misc_feature (2034)..(2034): n is a, c, g, or t
  misc_feature (2037)..(2037): n is a, c, g, or t
  misc_feature (2040)..(2040): n is a, c, g, or t
  misc_feature (2046)..(2046): n is a, c, g, or t
  misc_feature (2049)..(2049): n is a, c, g, or t
  misc_feature (2052)..(2052): n is a, c, g, or t
  misc_feature (2055)..(2055): n is a, c, g, or t
  misc_feature (2058)..(2058): n is a, c, g, or t
  misc_feature (2061)..(2061): n is a, c, g, or t
  misc_feature (2064)..(2064): n is a, c, g, or t
  misc_feature (2067)..(2067): n is a, c, g, or t
  misc_feature (2070)..(2070): n is a, c, g, or t
  misc_feature (2073)..(2073): n is a, c, g, or t
  misc_feature (2076)..(2076): n is a, c, g, or t
  misc_feature (2079)..(2079): n is a, c, g, or t
  misc_feature (2085)..(2085): n is a, c, g, or t
  misc_feature (2091)..(2091): n is a, c, g, or t
  misc_feature (2094)..(2094): n is a, c, g, or t
  misc_feature (2097)..(2097): n is a, c, g, or t
  misc_feature (2100)..(2100): n is a, c, g, or t
  misc_feature (2103)..(2103): n is a, c, g, or t
  misc_feature (2106)..(2106): n is a, c, g, or t
  misc_feature (2109)..(2109): n is a, c, g, or t
  misc_feature (2112)..(2112): n is a, c, g, or t
  misc_feature (2121)..(2121): n is a, c, g, or t
  misc_feature (2127)..(2127): n is a, c, g, or t
  misc_feature (2130)..(2130): n is a, c, g, or t
  misc_feature (2133)..(2133): n is a, c, g, or t
  misc_feature (2136)..(2136): n is a, c, g, or t
  misc_feature (2139)..(2139): n is a, c, g, or t
  misc_feature (2145)..(2145): n is a, c, g, or t
  misc_feature (2148)..(2148): n is a, c, g, or t
  misc_feature (2154)..(2154): n is a, c, g, or t
  misc_feature (2157)..(2157): n is a, c, g, or t
  misc_feature (2160)..(2160): n is a, c, g, or t
  misc_feature (2163)..(2163): n is a, c, g, or t
  misc_feature (2166)..(2166): n is a, c, g, or t
  misc_feature (2169)..(2169): n is a, c, g, or t
  misc_feature (2172)..(2172): n is a, c, g, or t
  misc_feature (2175)..(2175): n is a, c, g, or t
  misc_feature (2178)..(2178): n is a, c, g, or t
  misc_feature (2181)..(2181): n is a, c, g, or t
  misc_feature (2184)..(2184): n is a, c, g, or t
  misc_feature (2193)..(2193): n is a, c, g, or t
  misc_feature (2199)..(2199): n is a, c, g, or t
  misc_feature (2202)..(2202): n is a, c, g, or t
  misc_feature (2208)..(2208): n is a, c, g, or t
  misc_feature (2211)..(2211): n is a, c, g, or t
  misc_feature (2214)..(2214): n is a, c, g, or t
  misc_feature (2217)..(2217): n is a, c, g, or t
  misc_feature (2220)..(2220): n is a, c, g, or t
  misc_feature (2229)..(2229): n is a, c, g, or t
  misc_feature (2235)..(2235): n is a, c, g, or t
  misc_feature (2238)..(2238): n is a, c, g, or t
  misc_feature (2241)..(2241): n is a, c, g, or t
  misc_feature (2244)..(2244): n is a, c, g, or t
  misc_feature (2247)..(2247): n is a, c, g, or t
  misc_feature (2250)..(2250): n is a, c, g, or t
  misc_feature (2256)..(2256): n is a, c, g, or t
  misc_feature (2259)..(2259): n is a, c, g, or t
  misc_feature (2262)..(2262): n is a, c, g, or t
  misc_feature (2265)..(2265): n is a, c, g, or t
  misc_feature (2268)..(2268): n is a, c, g, or t
  misc_feature (2271)..(2271): n is a, c, g, or t
  misc_feature (2274)..(2274): n is a, c, g, or t
  misc_feature (2277)..(2277): n is a, c, g, or t
  misc_feature (2280)..(2280): n is a, c, g, or t
  misc_feature (2283)..(2283): n is a, c, g, or t
  misc_feature (2286)..(2286): n is a, c, g, or t
  misc_feature (2289)..(2289): n is a, c, g, or t
  misc_feature (2292)..(2292): n is a, c, g, or t
  misc_feature (2298)..(2298): n is a, c, g, or t
  misc_feature (2301)..(2301): n is a, c, g, or t
  misc_feature (2304)..(2304): n is a, c, g, or t
  misc_feature (2310)..(2310): n is a, c, g, or t
  misc_feature (2316)..(2316): n is a, c, g, or t
  misc_feature (2319)..(2319): n is a, c, g, or t
  misc_feature (2328)..(2328): n is a, c, g, or t
  misc_feature (2337)..(2337): n is a, c, g, or t
  misc_feature (2346)..(2346): n is a, c, g, or t
  misc_feature (2352)..(2352): n is a, c, g, or t
  misc_feature (2355)..(2355): n is a, c, g, or t
  misc_feature (2361)..(2361): n is a, c, g, or t
  misc_feature (2364)..(2364): n is a, c, g, or t
  misc_feature (2367)..(2367): n is a, c, g, or t
  misc_feature (2370)..(2370): n is a, c, g, or t
  misc_feature (2373)..(2373): n is a, c, g, or t
  misc_feature (2376)..(2376): n is a, c, g, or t
  misc_feature (2379)..(2379): n is a, c, g, or t
  misc_feature (2382)..(2382): n is a, c, g, or t
  misc_feature (2388)..(2388): n is a, c, g, or t
  misc_feature (2391)..(2391): n is a, c, g, or t
  misc_feature (2397)..(2397): n is a, c, g, or t
  misc_feature (2400)..(2400): n is a, c, g, or t
  misc_feature (2403)..(2403): n is a, c, g, or t
  misc_feature (2406)..(2406): n is a, c, g, or t
  misc_feature (2409)..(2409): n is a, c, g, or t
  misc_feature (2412)..(2412): n is a, c, g, or t
  misc_feature (2415)..(2415): n is a, c, g, or t
  misc_feature (2418)..(2418): n is a, c, g, or t
  misc_feature (2421)..(2421): n is a, c, g, or t
  misc_feature (2427)..(2427): n is a, c, g, or t
  misc_feature (2436)..(2436): n is a, c, g, or t
  misc_feature (2439)..(2439): n is a, c, g, or t
  misc_feature (2445)..(2445): n is a, c, g, or t
  misc_feature (2451)..(2451): n is a, c, g, or t
  misc_feature (2454)..(2454): n is a, c, g, or t
  misc_feature (2457)..(2457): n is a, c, g, or t
  misc_feature (2460)..(2460): n is a, c, g, or t
  misc_feature (2463)..(2463): n is a, c, g, or t
  misc_feature (2466)..(2466): n is a, c, g, or t
  misc_feature (2469)..(2469): n is a, c, g, or t
  misc_feature (2472)..(2472): n is a, c, g, or t
  misc_feature (2475)..(2475): n is a, c, g, or t
  misc_feature (2478)..(2478): n is a, c, g, or t
  misc_feature (2481)..(2481): n is a, c, g, or t
  misc_feature (2484)..(2484): n is a, c, g, or t
  misc_feature (2487)..(2487): n is a, c, g, or t
  misc_feature (2490)..(2490): n is a, c, g, or t
  misc_feature (2493)..(2493): n is a, c, g, or t
  misc_feature (2496)..(2496): n is a, c, g, or t
  misc_feature (2499)..(2499): n is a, c, g, or t
  misc_feature (2508)..(2508): n is a, c, g, or t
  misc_feature (2511)..(2511): n is a, c, g, or t
  misc_feature (2514)..(2514): n is a, c, g, or t
  misc_feature (2517)..(2517): n is a, c, g, or t
  misc_feature (2520)..(2520): n is a, c, g, or t
  misc_feature (2526)..(2526): n is a, c, g, or t
  misc_feature (2529)..(2529): n is a, c, g, or t
  misc_feature (2535)..(2535): n is a, c, g, or t
  misc_feature (2544)..(2544): n is a, c, g, or t
  misc_feature (2550)..(2550): n is a, c, g, or t
  misc_feature (2553)..(2553): n is a, c, g, or t
  misc_feature (2556)..(2556): n is a, c, g, or t
  misc_feature (2559)..(2559): n is a, c, g, or t
  misc_feature (2562)..(2562): n is a, c, g, or t
  misc_feature (2568)..(2568): n is a, c, g, or t
  misc_feature (2571)..(2571): n is a, c, g, or t
  misc_feature (2574)..(2574): n is a, c, g, or t
  misc_feature (2577)..(2577): n is a, c, g, or t
  misc_feature (2580)..(2580): n is a, c, g, or t
  misc_feature (2583)..(2583): n is a, c, g, or t
  misc_feature (2586)..(2586): n is a, c, g, or t
  misc_feature (2589)..(2589): n is a, c, g, or t
  misc_feature (2592)..(2592): n is a, c, g, or t
  misc_feature (2598)..(2598): n is a, c, g, or t
  misc_feature (2601)..(2601): n is a, c, g, or t
  misc_feature (2604)..(2604): n is a, c, g, or t
  misc_feature (2607)..(2607): n is a, c, g, or t
  misc_feature (2616)..(2616): n is a, c, g, or t
  misc_feature (2622)..(2622): n is a, c, g, or t
  misc_feature (2625)..(2625): n is a, c, g, or t
  misc_feature (2631)..(2631): n is a, c, g, or t
  misc_feature (2634)..(2634): n is a, c, g, or t
  misc_feature (2637)..(2637): n is a, c, g, or t
  misc_feature (2640)..(2640): n is a, c, g, or t
  misc_feature (2643)..(2643): n is a, c, g, or t
  misc_feature (2646)..(2646): n is a, c, g, or t
  misc_feature (2652)..(2652): n is a, c, g, or t
  misc_feature (2661)..(2661): n is a, c, g, or t
  misc_feature (2667)..(2667): n is a, c, g, or t
  misc_feature (2670)..(2670): n is a, c, g, or t
  misc_feature (2673)..(2673): n is a, c, g, or t
  misc_feature (2676)..(2676): n is a, c, g, or t
  misc_feature (2679)..(2679): n is a, c, g, or t
  misc_feature (2682)..(2682): n is a, c, g, or t
  misc_feature (2685)..(2685): n is a, c, g, or t
  misc_feature (2688)..(2688): n is a, c, g, or t
  misc_feature (2691)..(2691): n is a, c, g, or t
  misc_feature (2694)..(2694): n is a, c, g, or t
  misc_feature (2697)..(2697): n is a, c, g, or t
  misc_feature (2700)..(2700): n is a, c, g, or t
  misc_feature (2706)..(2706): n is a, c, g, or t
  misc_feature (2712)..(2712): n is a, c, g, or t
  misc_feature (2715)..(2715): n is a, c, g, or t
  misc_feature (2718)..(2718): n is a, c, g, or t
  misc_feature (2724)..(2724): n is a, c, g, or t
  misc_feature (2727)..(2727): n is a, c, g, or t
  misc_feature (2733)..(2733): n is a, c, g, or t
  misc_feature (2736)..(2736): n is a, c, g, or t
  misc_feature (2739)..(2739): n is a, c, g, or t
  misc_feature (2742)..(2742): n is a, c, g, or t
  misc_feature (2745)..(2745): n is a, c, g, or t
  misc_feature (2748)..(2748): n is a, c, g, or t
  misc_feature (2751)..(2751): n is a, c, g, or t
  misc_feature (2757)..(2757): n is a, c, g, or t
  misc_feature (2760)..(2760): n is a, c, g, or t
  misc_feature (2763)..(2763): n is a, c, g, or t
  misc_feature (2766)..(2766): n is a, c, g, or t
  misc_feature (2769)..(2769): n is a, c, g, or t
  misc_feature (2772)..(2772): n is a, c, g, or t
  misc_feature (2775)..(2775): n is a, c, g, or t
  misc_feature (2778)..(2778): n is a, c, g, or t
  misc_feature (2784)..(2784): n is a, c, g, or t
  misc_feature (2787)..(2787): n is a, c, g, or t
  misc_feature (2790)..(2790): n is a, c, g, or t
  misc_feature (2793)..(2793): n is a, c, g, or t
  misc_feature (2796)..(2796): n is a, c, g, or t
  misc_feature (2802)..(2802): n is a, c, g, or t
  misc_feature (2805)..(2805): n is a, c, g, or t
  misc_feature (2808)..(2808): n is a, c, g, or t
  misc_feature (2811)..(2811): n is a, c, g, or t
  misc_feature (2814)..(2814): n is a, c, g, or t
  misc_feature (2820)..(2820): n is a, c, g, or t
  misc_feature (2826)..(2826): n is a, c, g, or t
  misc_feature (2829)..(2829): n is a, c, g, or t
  misc_feature (2832)..(2832): n is a, c, g, or t
  misc_feature (2835)..(2835): n is a, c, g, or t
  misc_feature (2838)..(2838): n is a, c, g, or t
  misc_feature (2844)..(2844): n is a, c, g, or t
  misc_feature (2847)..(2847): n is a, c, g, or t
  misc_feature (2850)..(2850): n is a, c, g, or t
  misc_feature (2853)..(2853): n is a, c, g, or t
  misc_feature (2856)..(2856): n is a, c, g, or t
  misc_feature (2859)..(2859): n is a, c, g, or t
  misc_feature (2862)..(2862): n is a, c, g, or t
  misc_feature (2865)..(2865): n is a, c, g, or t
  misc_feature (2871)..(2871): n is a, c, g, or t
  misc_feature (2874)..(2874): n is a, c, g, or t
  misc_feature (2877)..(2877): n is a, c, g, or t
  misc_feature (2880)..(2880): n is a, c, g, or t
  misc_feature (2883)..(2883): n is a, c, g, or t
  misc_feature (2889)..(2889): n is a, c, g, or t
  misc_feature (2892)..(2892): n is a, c, g, or t
  misc_feature (2895)..(2895): n is a, c, g, or t
  misc_feature (2898)..(2898): n is a, c, g, or t
  misc_feature (2901)..(2901): n is a, c, g, or t
  misc_feature (2907)..(2907): n is a, c, g, or t
  misc_feature (2910)..(2910): n is a, c, g, or t
  misc_feature (2913)..(2913): n is a, c, g, or t
  misc_feature (2919)..(2919): n is a, c, g, or t
  misc_feature (2922)..(2922): n is a, c, g, or t
  misc_feature (2925)..(2925): n is a, c, g, or t
  misc_feature (2928)..(2928): n is a, c, g, or t
  misc_feature (2937)..(2937): n is a, c, g, or t
  misc_feature (2940)..(2940): n is a, c, g, or t
  misc_feature (2943)..(2943): n is a, c, g, or t
  misc_feature (2946)..(2946): n is a, c, g, or t
  misc_feature (2955)..(2955): n is a, c, g, or t
  misc_feature (2964)..(2964): n is a, c, g, or t
  misc_feature (2967)..(2967): n is a, c, g, or t
  misc_feature (2970)..(2970): n is a, c, g, or t
  misc_feature (2973)..(2973): n is a, c, g, or t
  misc_feature (2976)..(2976): n is a, c, g, or t
  misc_feature (2982)..(2982): n is a, c, g, or t
  misc_feature (2988)..(2988): n is a, c, g, or t
  misc_feature (2991)..(2991): n is a, c, g, or t
  misc_feature (2994)..(2994): n is a, c, g, or t
  misc_feature (2997)..(2997): n is a, c, g, or t
  misc_feature (3000)..(3000): n is a, c, g, or t
  misc_feature (3009)..(3009): n is a, c, g, or t
  misc_feature (3015)..(3015): n is a, c, g, or t
  misc_feature (3018)..(3018): n is a, c, g, or t
  misc_feature (3027)..(3027): n is a, c, g, or t
  misc_feature (3030)..(3030): n is a, c, g, or t
  misc_feature (3033)..(3033): n is a, c, g, or t
  misc_feature (3036)..(3036): n is a, c, g, or t
  misc_feature (3042)..(3042): n is a, c, g, or t
  misc_feature (3045)..(3045): n is a, c, g, or t
  misc_feature (3048)..(3048): n is a, c, g, or t
  misc_feature (3051)..(3051): n is a, c, g, or t
  misc_feature (3054)..(3054): n is a, c, g, or t
  misc_feature (3060)..(3060): n is a, c, g, or t
  misc_feature (3063)..(3063): n is a, c, g, or t
  misc_feature (3066)..(3066): n is a, c, g, or t
  misc_feature (3072)..(3072): n is a, c, g, or t
  misc_feature (3075)..(3075): n is a, c, g, or t
  misc_feature (3078)..(3078): n is a, c, g, or t
  misc_feature (3081)..(3081): n is a, c, g, or t
  misc_feature (3084)..(3084): n is a, c, g, or t
  misc_feature (3087)..(3087): n is a, c, g, or t
  misc_feature (3090)..(3090): n is a, c, g, or t
  misc_feature (3093)..(3093): n is a, c, g, or t
  misc_feature (3096)..(3096): n is a, c, g, or t
  misc_feature (3099)..(3099): n is a, c, g, or t
  misc_feature (3105)..(3105): n is a, c, g, or t
  misc_feature (3108)..(3108): n is a, c, g, or t
  misc_feature (3114)..(3114): n is a, c, g, or t
  misc_feature (3117)..(3117): n is a, c, g, or t
  misc_feature (3120)..(3120): n is a, c, g, or t
  misc_feature (3123)..(3123): n is a, c, g, or t
  misc_feature (3126)..(3126): n is a, c, g, or t
  misc_feature (3129)..(3129): n is a, c, g, or t
  misc_feature (3132)..(3132): n is a, c, g, or t
  misc_feature (3135)..(3135): n is a, c, g, or t
  misc_feature (3138)..(3138): n is a, c, g, or t
  misc_feature (3141)..(3141): n is a, c, g, or t
  misc_feature (3144)..(3144): n is a, c, g, or t
  misc_feature (3147)..(3147): n is a, c, g, or t
  misc_feature (3150)..(3150): n is a, c, g, or t
  misc_feature (3153)..(3153): n is a, c, g, or t
  misc_feature (3156)..(3156): n is a, c, g, or t
  misc_feature (3159)..(3159): n is a, c, g, or t
  misc_feature (3162)..(3162): n is a, c, g, or t
  misc_feature (3165)..(3165): n is a, c, g, or t
  misc_feature (3171)..(3171): n is a, c, g, or t
  misc_feature (3180)..(3180): n is a, c, g, or t
  misc_feature (3201)..(3201): n is a, c, g, or t
  misc_feature (3210)..(3210): n is a, c, g, or t
  misc_feature (3240)..(3240): n is a, c, g, or t
  misc_feature (3246)..(3246): n is a, c, g, or t
  misc_feature (3255)..(3255): n is a, c, g, or t
  misc_feature (3258)..(3258): n is a, c, g, or t
  misc_feature (3261)..(3261): n is a, c, g, or t
  misc_feature (3273)..(3273): n is a, c, g, or t
  misc_feature (3285)..(3285): n is a, c, g, or t
  misc_feature (3288)..(3288): n is a, c, g, or t
  misc_feature (3291)..(3291): n is a, c, g, or t
  misc_feature (3294)..(3294): n is a, c, g, or t
  misc_feature (3297)..(3297): n is a, c, g, or t
  misc_feature (3300)..(3300): n is a, c, g, or t
  misc_feature (3303)..(3303): n is a, c, g, or t
  misc_feature (3306)..(3306): n is a, c, g, or t
  misc_feature (3309)..(3309): n is a, c, g, or t
  misc_feature (3312)..(3312): n is a, c, g, or t
  misc_feature (3315)..(3315): n is a, c, g, or t
  misc_feature (3324)..(3324): n is a, c, g, or t
  misc_feature (3327)..(3327): n is a, c, g, or t
  misc_feature (3330)..(3330): n is a, c, g, or t
  misc_feature (3333)..(3333): n is a, c, g, or t
  misc_feature (3336)..(3336): n is a, c, g, or t
  misc_feature (3339)..(3339): n is a, c, g, or t
  misc_feature (3342)..(3342): n is a, c, g, or t
  misc_feature (3345)..(3345): n is a, c, g, or t
  misc_feature (3348)..(3348): n is a, c, g, or t
  misc_feature (3351)..(3351): n is a, c, g, or t
  misc_feature (3354)..(3354): n is a, c, g, or t
  misc_feature (3357)..(3357): n is a, c, g, or t
  misc_feature (3360)..(3360): n is a, c, g, or t
  misc_feature (3363)..(3363): n is a, c, g, or t
  misc_feature (3366)..(3366): n is a, c, g, or t
  misc_feature (3369)..(3369): n is a, c, g, or t
  misc_feature (3378)..(3378): n is a, c, g, or t
  misc_feature (3381)..(3381): n is a, c, g, or t
  misc_feature (3387)..(3387): n is a, c, g, or t
  misc_feature (3390)..(3390): n is a, c, g, or t
  misc_feature (3396)..(3396): n is a, c, g, or t
  misc_feature (3399)..(3399): n is a, c, g, or t
  misc_feature (3402)..(3402): n is a, c, g, or t
  misc_feature (3405)..(3405): n is a, c, g, or t
  misc_feature (3408)..(3408): n is a, c, g, or t
  misc_feature (3411)..(3411): n is a, c, g, or t
  misc_feature (3414)..(3414): n is a, c, g, or t
  misc_feature (3417)..(3417): n is a, c, g, or t
  misc_feature (3420)..(3420): n is a, c, g, or t
  misc_feature (3423)..(3423): n is a, c, g, or t
  misc_feature (3426)..(3426): n is a, c, g, or t
  misc_feature (3432)..(3432): n is a, c, g, or t
  misc_feature (3441)..(3441): n is a, c, g, or t
  misc_feature (3450)..(3450): n is a, c, g, or t
  misc_feature (3456)..(3456): n is a, c, g, or t
  misc_feature (3462)..(3462): n is a, c, g, or t
  misc_feature (3465)..(3465): n is a, c, g, or t
  misc_feature (3474)..(3474): n is a, c, g, or t
  misc_feature (3477)..(3477): n is a, c, g, or t
  misc_feature (3480)..(3480): n is a, c, g, or t
  misc_feature (3483)..(3483): n is a, c, g, or t
  misc_feature (3486)..(3486): n is a, c, g, or t
  misc_feature (3489)..(3489): n is a, c, g, or t
  misc_feature (3492)..(3492): n is a, c, g, or t
  misc_feature (3495)..(3495): n is a, c, g, or t
  misc_feature (3501)..(3501): n is a, c, g, or t
  misc_feature (3504)..(3504): n is a, c, g, or t
  misc_feature (3507)..(3507): n is a, c, g, or t
  misc_feature (3510)..(3510): n is a, c, g, or t
  misc_feature (3516)..(3516): n is a, c, g, or t
  misc_feature (3525)..(3525): n is a, c, g, or t
  misc_feature (3528)..(3528): n is a, c, g, or t
  misc_feature (3531)..(3531): n is a, c, g, or t
  misc_feature (3534)..(3534): n is a, c, g, or t
  misc_feature (3537)..(3537): n is a, c, g, or t
  misc_feature (3543)..(3543): n is a, c, g, or t
  misc_feature (3552)..(3552): n is a, c, g, or t
  misc_feature (3558)..(3558): n is a, c, g, or t
  misc_feature (3561)..(3561): n is a, c, g, or t
  misc_feature (3567)..(3567): n is a, c, g, or t
  misc_feature (3570)..(3570): n is a, c, g, or t
  misc_feature (3573)..(3573): n is a, c, g, or t
  misc_feature (3576)..(3576): n is a, c, g, or t
  misc_feature (3579)..(3579): n is a, c, g, or t
  misc_feature (3582)..(3582): n is a, c, g, or t
  misc_feature (3588)..(3588): n is a, c, g, or t
  misc_feature (3594)..(3594): n is a, c, g, or t
  misc_feature (3597)..(3597): n is a, c, g, or t
  misc_feature (3603)..(3603): n is a, c, g, or t
  misc_feature (3606)..(3606): n is a, c, g, or t
ggnccnaarggngaraarggngarwsnggngcnytnggnccnwsnggnytnccnggnwsnacnggngaraarggncaraarggngaraarggngayggnggnathaarggngtnccnggnaarccnggnmgngayggnmgnccnggngarathtgygtnathggnccnaarggncaraarggngayccnggnttygtnggnccngarggnytngcnggngarccnggnccnccnggnytnccnggnccnccnggnathggnytnccnggnacnccnggngayccnggnggnccnccnggnccnaarggngayaarggnwsnwsnggnathccnggnaargarggnccnggnggnaarccnggnaarccnggngtnaarggngaraarggngayccntgygargtntgyccnacnytnccngarggnttycaraayttygtnggnytnccnggnaarccnggnccnaarggngarccnggngayccngtnccngcnmgnggngayccnggnathcarggnathaarggngaraarggngarccntgyytnwsntgywsnwsngtngtnggngcncarcayytngtnwsnwsnacnggngcnwsnggngaygtnggnwsnccnggnttyggnytnccnggnytnccnggnmgngcnggngtnccnggnytnaarggngaraarggnaayttyggngargcnggnccngcnggnwsnccnggnccnccnggnccngtnggnccngcnggnathaarggngcnaarggngarccntgygarccntgyccngcnytnwsnaayytncargayggngaygtnmgngtngtngcnytnccnggnccnwsnggngaraarggngarccnggnccnccnggnttyggnytnccnggnaarcarggnaargcnggngarmgnggnytnaarggncaraarggngaygcnggnaayccnggngayccnggnacnccnggnacnacnggnmgnccnggnytnwsnggngarccnggngtncarggnccngcnggnccnaarggngaraarggngayggntgyacngcntgyccnwsnytncarggnacngtnacngayatggcnggnmgnccnggncarccnggnccnaarggngarcarggnccngarggngtnggnmgnccnggnaarccnggncarccnggnytnccnggngtncarggnccnccnggnytnaarggngtncarggngarccnggnccnccnggnmgnggngtncarggnccncarggngarccnggngcnccnggnytnccnggnathcarggnytnccnggnccnmgnggnccnccnggnccnacnggngaraarggngcncarggnwsnccnggngtnaarggngcnacnggnccngtnggnccnccnggngcnwsngtnwsnggnccnccnggnmgngayggncarcarggncaracnggnytnmgnggnacnccnggngaraarggnccnmgnggngaraarggngarccnggngartgywsntgyccnwsncarggngayytnathttywsnggnatgccnggngcnccnggnytntggatgggnwsnwsntggcarccnggnccncarggnccnccnggnathccnggnccnccnggnccnccnggngtnccnggnytncarggngtnccnggnaayaayggnytnccnggncarccnggnytnacngcngarytnggnwsnytnccnathgarcarcayytnytnaarwsnathtgyggngaytgygtncarggncarmgngcncayccnggntayytngtngaraarggngaraarggngaycarggnathccnggngtnccnggnytngayaaytgygcncartgyttyytnwsnytngarmgnccnmgngcngargargcnmgnggngayaaywsngarggngayccnggntgygtnggnwsnccnggnytnccnggnccnccnggnytnccnggncarmgnggngargarggnccnccnggnatgmgnggnwsnccnggnccnccnggnccnathggnccnccnggnttyccnggngcngtnggnwsnccnggnytnccnggnytncarggngarmgnggnytnacnggnytnacnggngayaarggngarccnggnccnccnggncarccnggntayccnggngcnacnggnccnccnggnytnccnggnathaarggngarmgnggntayacnggnwsngcnggngaraarggngarccnggnccnccnggnwsngarggnytnccnggnccnccnggnccngcnggnccnmgnggngarmgnggnccncarggnaaywsnggngaraarggngaycarggnttycarggncarccnggnttyccnggnccnccnggnccnccnggnttyccnggnaargtnggnwsnccnggnccnccnggnccncargcngaraarggnwsngarggnathmgnggnccnwsnggnytnccnggnwsnccnggnccnccnggnccnccnggnathcarggnccngcnggnytngayggnytngayggnaargayggnaarccnggnytnmgnggngayccnggnccngcnggnccnccnggnytnatgggnccnccnggnttyaarggnaaracnggncayccnggnytnccnggnccnaarggngaytgyggnaarccnggnccnccnggnwsnacnggnmgnccnggngcngarggngarccnggngcnatgggnccncarggnmgnccnggnccnccnggncaygtnggnccnccnggnccnccnggncarccnggnccngcnggnathwsngcngtnggnytnaarggngaymgnggngcnacnggngarmgnggnytngcnggnytnccnggncarccnggnccnccnggncayccnggnccnccnggngarccnggnacngayggngcngcnggnaargarggnccnccnggnaarcarggnttytayggnccnccnggnccnaarggngayccnggngcngcnggncaraarggncargcnggngaraarggnmgngcnggnatgccnggnggnccnggnaarwsnggnwsnatgggnccngtnggnccnccnggnccngcnggngarmgnggncayccnggngcnccnggnccnwsnggnwsnccnggnytnccnggngtnccnggnwsnatgggngayatggtnaaytaygaygarathaarmgnttyathmgncargarathathaaratgttygaygarmgnatggcntaytayacnwsnmgnatgcarttyccnatggaratggcngcngcnccnggnmgnccnggnccnccnggnaargayggngcnccnggnmgnccnggngcnccnggnwsnccnggnytnccnggncarathggnmgngarggnmgncarggnytnccnggngtnmgnggnytnccnggnacnaarggngaraarggngayathggnathggnathgcnggngaraayggnytnccnggnccnccnggnccncarggnccnccnggntayggnaaratgggngcnacnggnccnatgggncarcarggnathccnggnathccnggnccnccnggnccnatgggncarccnggnaargcnggncaytgy

SEQ ID NO: 1132 - DNA, 2748 bp, Artificial Sequence
  hCol-CNA37 (alpha1(XVII) THD)
  misc_feature (3)..(3): n is a, c, g, or t
  misc_feature (6)..(6): n is a, c, g, or t
  misc_feature (9)..(9): n is a, c, g, or t
  misc_feature (12)..(12): n is a, c, g, or t
  misc_feature (15)..(15): n is a, c, g, or t
  misc_feature (21)..(21): n is a, c, g, or t
  misc_feature (30)..(30): n is a, c, g, or t
  misc_feature (33)..(33): n is a, c, g, or t
  misc_feature (36)..(36): n is a, c, g, or t
  misc_feature (39)..(39): n is a, c, g, or t
  misc_feature (42)..(42): n is a, c, g, or t
  misc_feature (48)..(48): n is a, c, g, or t
  misc_feature (54)..(54): n is a, c, g, or t
  misc_feature (57)..(57): n is a, c, g, or t
  misc_feature (63)..(63): n is a, c, g, or t
  misc_feature (66)..(66): n is a, c, g, or t
  misc_feature (69)..(69): n is a, c, g, or t
  misc_feature (72)..(72): n is a, c, g, or t
  misc_feature (75)..(75): n is a, c, g, or t
  misc_feature (81)..(81): n is a, c, g, or t
  misc_feature (84)..(84): n is a, c, g, or t
  misc_feature (87)..(87): n is a, c, g, or t
  misc_feature (90)..(90): n is a, c, g, or t
  misc_feature (93)..(93): n is a, c, g, or t
  misc_feature (99)..(99): n is a, c, g, or t
  misc_feature (102)..(102): n is a, c, g, or t
  misc_feature (105)..(105): n is a, c, g, or t
  misc_feature (111)..(111): n is a, c, g, or t
  misc_feature (114)..(114): n is a, c, g, or t
  misc_feature (120)..(120): n is a, c, g, or t
  misc_feature (129)..(129): n is a, c, g, or t
  misc_feature (132)..(132): n is a, c, g, or t
  misc_feature (135)..(135): n is a, c, g, or t
  misc_feature (138)..(138): n is a, c, g, or t
  misc_feature (144)..(144): n is a, c, g, or t
  misc_feature (147)..(147): n is a, c, g, or t
  misc_feature (156)..(156): n is a, c, g, or t
  misc_feature (159)..(159): n is a, c, g, or t
  misc_feature (165)..(165): n is a, c, g, or t
  misc_feature (171)..(171): n is a, c, g, or t
  misc_feature (174)..(174): n is a, c, g, or t
  misc_feature (177)..(177): n is a, c, g, or t
  misc_feature (183)..(183): n is a, c, g, or t
  misc_feature (186)..(186): n is a, c, g, or t
  misc_feature (192)..(192): n is a, c, g, or t
  misc_feature (195)..(195): n is a, c, g, or t
  misc_feature (198)..(198): n is a, c, g, or t
  misc_feature (201)..(201): n is a, c, g, or t
  misc_feature (207)..(207): n is a, c, g, or t
  misc_feature (210)..(210): n is a, c, g, or t
  misc_feature (213)..(213): n is a, c, g, or t
  misc_feature (216)..(216): n is a, c, g, or t
  misc_feature (219)..(219): n is a, c, g, or t
  misc_feature (222)..(222): n is a, c, g, or t
  misc_feature (225)..(225): n is a, c, g, or t
  misc_feature (234)..(234): n is a, c, g, or t
  misc_feature (240)..(240): n is a, c, g, or t
  misc_feature (243)..(243): n is a, c, g, or t
  misc_feature (246)..(246): n is a, c, g, or t
  misc_feature (249)..(249): n is a, c, g, or t
  misc_feature (252)..(252): n is a, c, g, or t
  misc_feature (258)..(258): n is a, c, g, or t
  misc_feature (261)..(261): n is a, c, g, or t
  misc_feature (264)..(264): n is a, c, g, or t
  misc_feature (270)..(270): n is a, c, g, or t
  misc_feature (273)..(273): n is a, c, g, or t
  misc_feature (276)..(276): n is a, c, g, or t
  misc_feature (279)..(279): n is a, c, g, or t
  misc_feature (282)..(282): n is a, c, g, or t
  misc_feature (285)..(285): n is a, c, g, or t
  misc_feature (288)..(288): n is a, c, g, or t
  misc_feature (291)..(291): n is a, c, g, or t
  misc_feature (294)..(294): n is a, c, g, or t
  misc_feature (297)..(297): n is a, c, g, or t
  misc_feature (300)..(300): n is a, c, g, or t
  misc_feature (306)..(306): n is a, c, g, or t
  misc_feature (309)..(309): n is a, c, g, or t
  misc_feature (312)..(312): n is a, c, g, or t
  misc_feature (315)..(315): n is a, c, g, or t
  misc_feature (318)..(318): n is a, c, g, or t
  misc_feature (321)..(321): n is a, c, g, or t
  misc_feature (324)..(324): n is a, c, g, or t
  misc_feature (327)..(327): n is a, c, g, or t
  misc_feature (333)..(333): n is a, c, g, or t
  misc_feature (336)..(336): n is a, c, g, or t
  misc_feature (339)..(339): n is a, c, g, or t
  misc_feature (342)..(342): n is a, c, g, or t
  misc_feature (345)..(345): n is a, c, g, or t
  misc_feature (348)..(348): n is a, c, g, or t
  misc_feature (351)..(351): n is a, c, g, or t
  misc_feature (354)..(354): n is a, c, g, or t
  misc_feature (360)..(360): n is a, c, g, or t
  misc_feature (363)..(363): n is a, c, g, or t
  misc_feature (366)..(366): n is a, c, g, or t
  misc_feature (369)..(369): n is a, c, g, or t
  misc_feature (375)..(375): n is a, c, g, or t
  misc_feature (378)..(378): n is a, c, g, or t
  misc_feature (381)..(381): n is a, c, g, or t
  misc_feature (384)..(384): n is a, c, g, or t
  misc_feature (387)..(387): n is a, c, g, or t
  misc_feature (390)..(390): n is a, c, g, or t
  misc_feature (396)..(396): n is a, c, g, or t
  misc_feature (405)..(405): n is a, c, g, or t
  misc_feature (408)..(408): n is a, c, g, or t
  misc_feature (414)..(414): n is a, c, g, or t
  misc_feature (417)..(417): n is a, c, g, or t
  misc_feature (420)..(420): n is a, c, g, or t
  misc_feature (423)..(423): n is a, c, g, or t
  misc_feature (426)..(426): n is a, c, g, or t
  misc_feature (432)..(432): n is a, c, g, or t
  misc_feature (441)..(441): n is a, c, g, or t
  misc_feature (450)..(450): n is a, c, g, or t
  misc_feature (453)..(453): n is a, c, g, or t
  misc_feature (456)..(456): n is a, c, g, or t
  misc_feature (459)..(459): n is a, c, g, or t
  misc_feature (462)..(462): n is a, c, g, or t
  misc_feature (465)..(465): n is a, c, g, or t
  misc_feature (468)..(468): n is a, c, g, or t
  misc_feature (474)..(474): n is a, c, g, or t
  misc_feature (477)..(477): n is a, c, g, or t
  misc_feature (483)..(483): n is a, c, g, or t
  misc_feature (486)..(486): n is a, c, g, or t
  misc_feature (489)..(489): n is a, c, g, or t
  misc_feature (492)..(492): n is a, c, g, or t
  misc_feature (495)..(495): n is a, c, g, or t
  misc_feature (498)..(498): n is a, c, g, or t
  misc_feature (501)..(501): n is a, c, g, or t
  misc_feature (504)..(504): n is a, c, g, or t
  misc_feature (510)..(510): n is a, c, g, or t
  misc_feature (513)..(513): n is a, c, g, or t
  misc_feature (516)..(516): n is a, c, g, or t
  misc_feature (522)..(522): n is a, c, g, or t
  misc_feature (525)..(525): n is a, c, g, or t
  misc_feature (531)..(531): n is a, c, g, or t
  misc_feature (534)..(534): n is a, c, g, or t
  misc_feature (537)..(537): n is a, c, g, or t
  misc_feature (540)..(540): n is a, c, g, or t
  misc_feature (543)..(543): n is a, c, g, or t
  misc_feature (549)..(549): n is a, c, g, or t
  misc_feature (558)..(558): n is a, c, g, or t
  misc_feature (561)..(561): n is a, c, g, or t
  misc_feature (564)..(564): n is a, c, g, or t
  misc_feature (567)..(567): n is a, c, g, or t
  misc_feature (576)..(576): n is a, c, g, or t
  misc_feature (579)..(579): n is a, c, g, or t
  misc_feature (582)..(582): n is a, c, g, or t
  misc_feature (585)..(585): n is a, c, g, or t
  misc_feature (591)..(591): n is a, c, g, or t
  misc_feature (594)..(594): n is a, c, g, or t
  misc_feature (600)..(600): n is a, c, g, or t
  misc_feature (603)..(603): n is a, c, g, or t
  misc_feature (606)..(606): n is a, c, g, or t
  misc_feature (609)..(609): n is a, c, g, or t
  misc_feature (612)..(612): n is a, c, g, or t
  misc_feature (615)..(615): n is a, c, g, or t
  misc_feature (618)..(618): n is a, c, g, or t
  misc_feature (621)..(621): n is a, c, g, or t
  misc_feature (627)..(627): n is a, c, g, or t
  misc_feature (630)..(630): n is a, c, g, or t
  misc_feature (636)..(636): n is a, c, g, or t
  misc_feature (639)..(639): n is a, c, g, or t
  misc_feature (642)..(642): n is a, c, g, or t
  misc_feature (645)..(645): n is a, c, g, or t
  misc_feature (648)..(648): n is a, c, g, or t
  misc_feature (651)..(651): n is a, c, g, or t
  misc_feature (657)..(657): n is a, c, g, or t
  misc_feature (660)..(660): n is a, c, g, or t
  misc_feature (666)..(666): n is a, c, g, or t
  misc_feature (669)..(669): n is a, c, g, or t
  misc_feature (672)..(672): n is a, c, g, or t
  misc_feature (675)..(675): n is a, c, g, or t
  misc_feature (678)..(678): n is a, c, g, or t
  misc_feature (681)..(681): n is a, c, g, or t
  misc_feature (684)..(684): n is a, c, g, or t
  misc_feature (687)..(687): n is a, c, g, or t
  misc_feature (690)..(690): n is a, c, g, or t
  misc_feature (693)..(693): n is a, c, g, or t
  misc_feature (702)..(702): n is a, c, g, or t
  misc_feature (708)..(708): n is a, c, g, or t
  misc_feature (711)..(711): n is a, c, g, or t
  misc_feature (714)..(714): n is a, c, g, or t
  misc_feature (717)..(717): n is a, c, g, or t
  misc_feature (720)..(720): n is a, c, g, or t
  misc_feature (729)..(729): n is a, c, g, or t
  misc_feature (732)..(732): n is a, c, g, or t
  misc_feature (735)..(735): n is a, c, g, or t
  misc_feature (741)..(741): n is a, c, g, or t
  misc_feature (744)..(744): n is a, c, g, or t
  misc_feature (747)..(747): n is a, c, g, or t
  misc_feature (753)..(753): n is a, c, g, or t
  misc_feature (756)..(756): n is a, c, g, or t
  misc_feature (759)..(759): n is a, c, g, or t
  misc_feature (762)..(762): n is a, c, g, or t
  misc_feature (765)..(765): n is a, c, g, or t
  misc_feature (768)..(768): n is a, c, g, or t
  misc_feature (771)..(771): n is a, c, g, or t
  misc_feature (774)..(774): n is a, c, g, or t
  misc_feature (777)..(777): n is a, c, g, or t
  misc_feature (780)..(780): n is a, c, g, or t
  misc_feature (783)..(783): n is a, c, g, or t
  misc_feature (786)..(786): n is a, c, g, or t
  misc_feature (792)..(792): n is a, c, g, or t
  misc_feature (795)..(795): n is a, c, g, or t
  misc_feature (798)..(798): n is a, c, g, or t
  misc_feature (801)..(801): n is a, c, g, or t
  misc_feature (804)..(804): n is a, c, g, or t
  misc_feature (807)..(807): n is a, c, g, or t
  misc_feature (810)..(810): n is a, c, g, or t
  misc_feature (813)..(813): n is a, c, g, or t
  misc_feature (816)..(816): n is a, c, g, or t
  misc_feature (819)..(819): n is a, c, g, or t
  misc_feature (822)..(822): n is a, c, g, or t
  misc_feature (825)..(825): n is a, c, g, or t
  misc_feature (828)..(828): n is a, c, g, or t
  misc_feature (831)..(831): n is a, c, g, or t
  misc_feature (834)..(834): n is a, c, g, or t
  misc_feature (837)..(837): n is a, c, g, or t
  misc_feature (840)..(840): n is a, c, g, or t
  misc_feature (843)..(843): n is a, c, g, or t
  misc_feature (846)..(846): n is a, c, g, or t
  misc_feature (858)..(858): n is a, c, g, or t
  misc_feature (861)..(861): n is a, c, g, or t
  misc_feature (867)..(867): n is a, c, g, or t
  misc_feature (873)..(873): n is a, c, g, or t
  misc_feature (876)..(876): n is a, c, g, or t
  misc_feature (879)..(879): n is a, c, g, or t
  misc_feature (882)..(882): n is a, c, g, or t
  misc_feature (885)..(885): n is a, c, g, or t
  misc_feature (888)..(888): n is a, c, g, or t
  misc_feature (891)..(891): n is a, c, g, or t
  misc_feature (894)..(894): n is a, c, g, or t
  misc_feature (897)..(897): n is a, c, g, or t
  misc_feature (900)..(900): n is a, c, g, or t
  misc_feature (903)..(903): n is a, c, g, or t
  misc_feature (906)..(906): n is a, c, g, or t
  misc_feature (909)..(909): n is a, c, g, or t
  misc_feature (912)..(912): n is a, c, g, or t
  misc_feature (915)..(915): n is a, c, g, or t
  misc_feature (921)..(921): n is a, c, g, or t
  misc_feature (924)..(924): n is a, c, g, or t
  misc_feature (927)..(927): n is a, c, g, or t
  misc_feature (930)..(930): n is a, c, g, or t
  misc_feature (933)..(933): n is a, c, g, or t
  misc_feature (936)..(936): n is a, c, g, or t
  misc_feature (939)..(939): n is a, c, g, or t
  misc_feature (942)..(942): n is a, c, g, or t
  misc_feature (945)..(945): n is a, c, g, or t
  misc_feature (948)..(948): n is a, c, g, or t
  misc_feature (951)..(951): n is a, c, g, or t
  misc_feature (957)..(957): n is a, c, g, or t
  misc_feature (960)..(960): n is a, c, g, or t
  misc_feature (963)..(963): n is a, c, g, or t
  misc_feature (966)..(966): n is a, c, g, or t
  misc_feature (969)..(969): n is a, c, g, or t
  misc_feature (972)..(972): n is a, c, g, or t
  misc_feature (975)..(975): n is a, c, g, or t
  misc_feature (978)..(978): n is a, c, g, or t
  misc_feature (981)..(981): n is a, c, g, or t
  misc_feature (984)..(984): n is a, c, g, or t
  misc_feature (987)..(987): n is a, c, g, or t
  misc_feature (993)..(993): n is a, c, g, or t
  misc_feature (996)..(996): n is a, c, g, or t
  misc_feature (1002)..(1002): n is a, c, g, or t
  misc_feature (1008)..(1008): n is a, c, g, or t
  misc_feature (1014)..(1014): n is a, c, g, or t
  misc_feature (1017)..(1017): n is a, c, g, or t
  misc_feature (1020)..(1020): n is a, c, g, or t
  misc_feature (1023)..(1023): n is a, c, g, or t
  misc_feature (1026)..(1026): n is a, c, g, or t
  misc_feature (1029)..(1029): n is a, c, g, or t
  misc_feature (1032)..(1032): n is a, c, g, or t
  misc_feature (1035)..(1035): n is a, c, g, or t
  misc_feature (1038)..(1038): n is a, c, g, or t
  misc_feature (1041)..(1041): n is a, c, g, or t
  misc_feature (1044)..(1044): n is a, c, g, or t
  misc_feature (1047)..(1047): n is a, c, g, or t
  misc_feature (1050)..(1050): n is a, c, g, or t
  misc_feature (1056)..(1056): n is a, c, g, or t
  misc_feature (1065)..(1065): n is a, c, g, or t
  misc_feature (1068)..(1068): n is a, c, g, or t
  misc_feature (1071)..(1071): n is a, c, g, or t
  misc_feature (1074)..(1074): n is a, c, g, or t
  misc_feature (1077)..(1077): n is a, c, g, or t
  misc_feature (1080)..(1080): n is a, c, g, or t
  misc_feature (1083)..(1083): n is a, c, g, or t
  misc_feature (1092)..(1092): n is a, c, g, or t
  misc_feature (1101)..(1101): n is a, c, g, or t
  misc_feature (1104)..(1104): n is a, c, g, or t
  misc_feature (1107)..(1107): n is a, c, g, or t
  misc_feature (1110)..(1110): n is a, c, g, or t
  misc_feature (1116)..(1116): n is a, c, g, or t
  misc_feature (1119)..(1119): n is a, c, g, or t
  misc_feature (1122)..(1122): n is a, c, g, or t
  misc_feature (1125)..(1125): n is a, c, g, or t
  misc_feature (1128)..(1128): n is a, c, g, or t
  misc_feature (1131)..(1131): n is a, c, g, or t
  misc_feature (1134)..(1134): n is a, c, g, or t
  misc_feature (1140)..(1140): n is a, c, g, or t
  misc_feature (1143)..(1143): n is a, c, g, or t
  misc_feature (1149)..(1149): n is a, c, g, or t
  misc_feature (1155)..(1155): n is a, c, g, or t
  misc_feature (1158)..(1158): n is a, c, g, or t
  misc_feature (1161)..(1161): n is a, c, g, or t
  misc_feature (1164)..(1164): n is a, c, g, or t
  misc_feature (1167)..(1167): n is a, c, g, or t
  misc_feature (1170)..(1170): n is a, c, g, or t
  misc_feature (1173)..(1173): n is a, c, g, or t
  misc_feature (1176)..(1176): n is a, c, g, or t
  misc_feature (1182)..(1182): n is a, c, g, or t
  misc_feature (1185)..(1185): n is a, c, g, or t
  misc_feature (1191)..(1191): n is a, c, g, or t
  misc_feature (1200)..(1200): n is a, c, g, or t
  misc_feature (1206)..(1206): n is a, c, g, or t
  misc_feature (1209)..(1209): n is a, c, g, or t
  misc_feature (1212)..(1212): n is a, c, g, or t
  misc_feature (1215)..(1215): n is a, c, g, or t
  misc_feature (1218)..(1218): n is a, c, g, or t
  misc_feature (1221)..(1221): n is a, c, g, or t
  misc_feature (1224)..(1224): n is a, c, g, or t
  misc_feature (1227)..(1227): n is a, c, g, or t
  misc_feature (1233)..(1233): n is a, c, g, or t
  misc_feature (1236)..(1236): n is a, c, g, or t
  misc_feature (1239)..(1239): n is a, c, g, or t
  misc_feature (1242)..(1242): n is a, c, g, or t
  misc_feature (1245)..(1245): n is a, c, g, or t
  misc_feature (1251)..(1251): n is a, c, g, or t
  misc_feature (1254)..(1254): n is a, c, g, or t
  misc_feature (1257)..(1257): n is a, c, g, or t
  misc_feature (1260)..(1260): n is a, c, g, or t
  misc_feature (1263)..(1263): n is a, c, g, or t
  misc_feature (1266)..(1266): n is a, c, g, or t
  misc_feature (1275)..(1275): n is a, c, g, or t
  misc_feature (1278)..(1278): n is a, c, g, or t
  misc_feature (1281)..(1281): n is a, c, g, or t
  misc_feature (1284)..(1284): n is a, c, g, or t
  misc_feature (1287)..(1287): n is a, c, g, or t
  misc_feature (1290)..(1290): n is a, c, g, or t
  misc_feature (1293)..(1293): n is a, c, g, or t
  misc_feature (1296)..(1296): n is a, c, g, or t
  misc_feature (1299)..(1299): n is a, c, g, or t
  misc_feature (1302)..(1302): n is a, c, g, or t
  misc_feature (1305)..(1305): n is a, c, g, or t
  misc_feature (1308)..(1308): n is a, c, g, or t
  misc_feature (1311)..(1311): n is a, c, g, or t
  misc_feature (1314)..(1314): n is a, c, g, or t
  misc_feature (1317)..(1317): n is a, c, g, or t
  misc_feature (1320)..(1320): n is a, c, g, or t
  misc_feature (1326)..(1326): n is a, c, g, or t
  misc_feature (1329)..(1329): n is a, c, g, or t
  misc_feature (1332)..(1332): n is a, c, g, or t
  misc_feature (1335)..(1335): n is a, c, g, or t
  misc_feature (1359)..(1359): n is a, c, g, or t
  misc_feature (1374)..(1374): n is a, c, g, or t
  misc_feature (1380)..(1380): n is a, c, g, or t
  misc_feature (1386)..(1386): n is a, c, g, or t
  misc_feature (1389)..(1389): n is a, c, g, or t
  misc_feature (1395)..(1395): n is a, c, g, or t
  misc_feature (1398)..(1398): n is a, c, g, or t
  misc_feature (1401)..(1401): n is a, c, g, or t
  misc_feature (1404)..(1404): n is a, c, g, or t
  misc_feature (1410)..(1410): n is a, c, g, or t
  misc_feature (1413)..(1413): n is a, c, g, or t
  misc_feature (1416)..(1416): n is a, c, g, or t
  misc_feature (1419)..(1419): n is a, c, g, or t
  misc_feature (1422)..(1422): n is a, c, g, or t
  misc_feature (1425)..(1425): n is a, c, g, or t
  misc_feature (1428)..(1428): n is a, c, g, or t
  misc_feature (1431)..(1431): n is a, c, g, or t
  misc_feature (1434)..(1434): n is a, c, g, or t
  misc_feature (1437)..(1437): n is a, c, g, or t
  misc_feature (1440)..(1440): n is a, c, g, or t
  misc_feature (1443)..(1443): n is a, c, g, or t
  misc_feature (1446)..(1446): n is a, c, g, or t
  misc_feature (1449)..(1449): n is a, c, g, or t
  misc_feature (1455)..(1455): n is a, c, g, or t
  misc_feature (1458)..(1458): n is a, c, g, or t
  misc_feature (1464)..(1464): n is a, c, g, or t
  misc_feature (1476)..(1476): n is a, c, g, or t
  misc_feature (1482)..(1482): n is a, c, g, or t
  misc_feature (1485)..(1485): n is a, c, g, or t
  misc_feature (1488)..(1488): n is a, c, g, or t
  misc_feature (1494)..(1494): n is a, c, g, or t
  misc_feature (1497)..(1497): n is a, c, g, or t
  misc_feature (1500)..(1500): n is a, c, g, or t
  misc_feature (1506)..(1506): n is a, c, g, or t
  misc_feature (1509)..(1509): n is a, c, g, or t
  misc_feature (1512)..(1512): n is a, c, g, or t
  misc_feature (1515)..(1515): n is a, c, g, or t
  misc_feature (1518)..(1518): n is a, c, g, or t
  misc_feature (1524)..(1524): n is a, c, g, or t
  misc_feature (1527)..(1527): n is a, c, g, or t
  misc_feature (1530)..(1530): n is a, c, g, or t
  misc_feature (1533)..(1533): n is a, c, g, or t
  misc_feature (1539)..(1539): n is a, c, g, or t
  misc_feature (1542)..(1542): n is a, c, g, or t
  misc_feature (1545)..(1545): n is a, c, g, or t
  misc_feature (1551)..(1551): n is a, c, g, or t
  misc_feature (1554)..(1554): n is a, c, g, or t
  misc_feature (1566)..(1566): n is a, c, g, or t
  misc_feature (1569)..(1569): n is a, c, g, or t
  misc_feature (1572)..(1572): n is a, c, g, or t
  misc_feature (1575)..(1575): n is a, c, g, or t
  misc_feature (1581)..(1581): n is a, c, g, or t
  misc_feature (1590)..(1590): n is a, c, g, or t
  misc_feature (1593)..(1593): n is a, c, g, or t
  misc_feature (1602)..(1602): n is a, c, g, or t
  misc_feature (1605)..(1605): n is a, c, g, or t
  misc_feature (1614)..(1614): n is a, c, g, or t
  misc_feature (1620)..(1620): n is a, c, g, or t
  misc_feature (1623)..(1623): n is a, c, g, or t
  misc_feature (1626)..(1626): n is a, c, g, or t
  misc_feature (1629)..(1629): n is a, c, g, or t
  misc_feature (1632)..(1632): n is a, c, g, or t
  misc_feature (1635)..(1635): n is a, c, g, or t
  misc_feature (1638)..(1638): n is a, c, g, or t
  misc_feature (1641)..(1641): n is a, c, g, or t
  misc_feature (1644)..(1644): n is a, c, g, or t
  misc_feature (1647)..(1647): n is a, c, g, or t
  misc_feature (1650)..(1650): n is a, c, g, or t
  misc_feature (1653)..(1653): n is a, c, g, or t
  misc_feature (1656)..(1656): n is a, c, g, or t
  misc_feature (1662)..(1662): n is a, c, g, or t
  misc_feature (1665)..(1665): n is a, c, g, or t
  misc_feature (1668)..(1668): n is a, c, g, or t
  misc_feature (1671)..(1671): n is a, c, g, or t
  misc_feature (1674)..(1674): n is a, c, g, or t
  misc_feature (1677)..(1677): n is a, c, g, or t
  misc_feature (1686)..(1686): n is a, c, g, or t
  misc_feature (1692)..(1692): n is a, c, g, or t
  misc_feature (1695)..(1695): n is a, c, g, or t
  misc_feature (1698)..(1698): n is a, c, g, or t
  misc_feature (1701)..(1701): n is a, c, g, or t
  misc_feature (1707)..(1707): n is a, c, g, or t
  misc_feature (1710)..(1710): n is a, c, g, or t
  misc_feature (1719)..(1719): n is a, c, g, or t
  misc_feature (1722)..(1722): n is a, c, g, or t
  misc_feature (1725)..(1725): n is a, c, g, or t
  misc_feature (1728)..(1728): n is a, c, g, or t
  misc_feature (1734)..(1734): n is a, c, g, or t
  misc_feature (1740)..(1740): n is a, c, g, or t
  misc_feature (1743)..(1743): n is a, c, g, or t
  misc_feature (1746)..(1746): n is a, c, g, or t
  misc_feature (1749)..(1749): n is a, c, g, or t
  misc_feature (1752)..(1752): n is a, c, g, or t
  misc_feature (1755)..(1755): n is a, c, g, or t
  misc_feature (1758)..(1758): n is a, c, g, or t
  misc_feature (1761)..(1761): n is a, c, g, or t
  misc_feature (1764)..(1764): n is a, c, g, or t
  misc_feature (1767)..(1767): n is a, c, g, or t
  misc_feature (1770)..(1770): n is a, c, g, or t
  misc_feature (1773)..(1773): n is a, c, g, or t
  misc_feature (1776)..(1776): n is a, c, g, or t
  misc_feature (1779)..(1779): n is a, c, g, or t
  misc_feature (1782)..(1782): n is a, c, g, or t
  misc_feature (1794)..(1794): n is a, c, g, or t
  misc_feature (1797)..(1797): n is a, c, g, or t
  misc_feature (1800)..(1800): n is a, c, g, or t
  misc_feature (1803)..(1803): n is a, c, g, or t
  misc_feature (1806)..(1806): n is a, c, g, or t
  misc_feature (1809)..(1809): n is a, c, g, or t
  misc_feature (1812)..(1812): n is a, c, g, or t
  misc_feature (1815)..(1815): n is a, c, g, or t
  misc_feature (1824)..(1824): n is a, c, g, or t
  misc_feature (1827)..(1827): n is a, c, g, or t
  misc_feature (1833)..(1833): n is a, c, g, or t
  misc_feature (1836)..(1836): n is a, c, g, or t
  misc_feature (1839)..(1839): n is a, c, g, or t
  misc_feature (1842)..(1842): n is a, c, g, or t
  misc_feature (1845)..(1845): n is a, c, g, or t
  misc_feature (1848)..(1848): n is a, c, g, or t
  misc_feature (1851)..(1851): n is a, c, g, or t
  misc_feature (1854)..(1854): n is a, c, g, or t
  misc_feature (1857)..(1857): n is a, c, g, or t
  misc_feature (1860)..(1860): n is a, c, g, or t
  misc_feature (1863)..(1863): n is a, c, g, or t
  misc_feature (1869)..(1869): n is a, c, g, or t
  misc_feature (1872)..(1872): n is a, c, g, or t
  misc_feature (1878)..(1878): n is a, c, g, or t
  misc_feature (1884)..(1884): n is a, c, g, or t
  misc_feature (1887)..(1887): n is a, c, g, or t
  misc_feature (1893)..(1893): n is a, c, g, or t
  misc_feature (1896)..(1896): n is a, c, g, or t
  misc_feature (1905)..(1905): n is a, c, g, or t
  misc_feature (1908)..(1908): n is a, c, g, or t
  misc_feature (1911)..(1911): n is a, c, g, or t
  misc_feature (1917)..(1917): n is a, c, g, or t
  misc_feature (1923)..(1923): n is a, c, g, or t
  misc_feature (1926)..(1926): n is a, c, g, or t
  misc_feature (1929)..(1929): n is a, c, g, or t
  misc_feature (1932)..(1932): n is a, c, g, or t
  misc_feature (1935)..(1935): n is a, c, g, or t
  misc_feature (1944)..(1944): n is a, c, g, or t
  misc_feature (1947)..(1947): n is a, c, g, or t
  misc_feature (1950)..(1950): n is a, c, g, or t
  misc_feature (1953)..(1953): n is a, c, g, or t
  misc_feature (1956)..(1956): n is a, c, g, or t
  misc_feature (1959)..(1959): n is a, c, g, or t
  misc_feature (1962)..(1962): n is a, c, g, or t
  misc_feature (1965)..(1965): n is a, c, g, or t
  misc_feature (1968)..(1968): n is a, c, g, or t
  misc_feature (1971)..(1971): n is a, c, g, or t
  misc_feature (1974)..(1974): n is a, c, g, or t
  misc_feature (1977)..(1977): n is a, c, g, or t
  misc_feature (1980)..(1980): n is a, c, g, or t
  misc_feature (1983)..(1983): n is a, c, g, or t
  misc_feature (1986)..(1986): n is a, c, g, or t
  misc_feature (1989)..(1989): n is a, c, g, or t
  misc_feature (1992)..(1992): n is a, c, g, or t
  misc_feature (1995)..(1995): n is a, c, g, or t
  misc_feature (1998)..(1998): n is a, c, g, or t
  misc_feature (2001)..(2001): n is a, c, g, or t
  misc_feature (2004)..(2004): n is a, c, g, or t
  misc_feature (2007)..(2007): n is a, c, g, or t
  misc_feature (2010)..(2010): n is a, c, g, or t
  misc_feature (2013)..(2013): n is a, c, g, or t
  misc_feature (2019)..(2019): n is a, c, g, or t
  misc_feature (2022)..(2022): n is a, c, g, or t
  misc_feature (2031)..(2031): n is a, c, g, or t
  misc_feature (2037)..(2037): n is a, c, g, or t
  misc_feature (2043)..(2043): n is a, c, g, or t
  misc_feature (2046)..(2046): n is a, c, g, or t
  misc_feature (2052)..(2052): n is a, c, g, or t
  misc_feature (2058)..(2058): n is a, c, g, or t
  misc_feature (2064)..(2064): n is a, c, g, or t
  misc_feature (2067)..(2067): n is a, c, g, or t
  misc_feature (2070)..(2070): n is a, c, g, or t
  misc_feature (2073)..(2073): n is a, c, g, or t
  misc_feature (2079)..(2079): n is a, c, g, or t
  misc_feature (2082)..(2082): n is a, c, g, or t
  misc_feature (2085)..(2085): n is a, c, g, or t
  misc_feature (2094)..(2094): n is a, c, g, or t
  misc_feature (2097)..(2097): n is a, c, g, or t
  misc_feature (2100)..(2100): n is a, c, g, or t
  misc_feature (2103)..(2103): n is a, c, g, or t
  misc_feature (2106)..(2106): n is a, c, g, or t
  misc_feature (2109)..(2109): n is a, c, g, or t
  misc_feature (2112)..(2112): n is a, c, g, or t
  misc_feature (2115)..(2115): n is a, c, g, or t
  misc_feature (2118)..(2118): n is a, c, g, or t
  misc_feature (2124)..(2124): n is a, c, g, or t
  misc_feature (2127)..(2127): n is a, c, g, or t
  misc_feature (2130)..(2130): n is a, c, g, or t
  misc_feature (2133)..(2133): n is a, c, g, or t
  misc_feature (2139)..(2139): n is a, c, g, or t
  misc_feature (2142)..(2142): n is a, c, g, or t
  misc_feature (2145)..(2145): n is a, c, g, or t
  misc_feature (2148)..(2148): n is a, c, g, or t
  misc_feature (2151)..(2151): n is a, c, g, or t
  misc_feature (2154)..(2154): n is a, c, g, or t
  misc_feature (2160)..(2160): n is a, c, g, or t
  misc_feature (2163)..(2163): n is a, c, g, or t
  misc_feature (2169)..(2169): n is a, c, g, or t
  misc_feature (2172)..(2172): n is a, c, g, or t
  misc_feature (2175)..(2175): n is a, c, g, or t
  misc_feature (2178)..(2178): n is a, c, g, or t
  misc_feature (2181)..(2181): n is a, c, g, or t
  misc_feature (2184)..(2184): n is a, c, g, or t
  misc_feature (2187)..(2187): n is a, c, g, or t
  misc_feature (2190)..(2190): n is a, c, g, or t
  misc_feature (2196)..(2196): n is a, c, g, or t
  misc_feature (2199)..(2199): n is a, c, g, or t
  misc_feature (2202)..(2202): n is a, c, g, or t
  misc_feature (2205)..(2205): n is a, c, g, or t
  misc_feature (2208)..(2208): n is a, c, g, or t
  misc_feature (2211)..(2211): n is a, c, g, or t
  misc_feature (2214)..(2214): n is a, c, g, or t
  misc_feature (2217)..(2217): n is a, c, g, or t
  misc_feature (2220)..(2220): n is a, c, g, or t
  misc_feature (2226)..(2226): n is a, c, g, or t
  misc_feature (2229)..(2229): n is a, c, g, or t
  misc_feature (2232)..(2232): n is a, c, g, or t
  misc_feature (2238)..(2238): n is a, c, g, or t
  misc_feature (2241)..(2241): n is a, c, g, or t
  misc_feature (2244)..(2244): n is a, c, g, or t
  misc_feature (2247)..(2247): n is a, c, g, or t
  misc_feature (2250)..(2250): n is a, c, g, or t
  misc_feature (2253)..(2253): n is a, c, g, or t
  misc_feature (2256)..(2256): n is a, c, g, or t
  misc_feature (2259)..(2259): n is a, c, g, or t
  misc_feature (2262)..(2262): n is a, c, g, or t
  misc_feature (2265)..(2265): n is a, c, g, or t
  misc_feature (2268)..(2268): n is a, c, g, or t
  misc_feature (2271)..(2271): n is a, c, g, or t
  misc_feature (2274)..(2274): n is a, c, g, or t
  misc_feature (2277)..(2277): n is a, c, g, or t
  misc_feature (2280)..(2280): n is a, c, g, or t
  misc_feature (2286)..(2286): n is a, c, g, or t
  misc_feature (2292)..(2292): n is a, c, g, or t
  misc_feature (2295)..(2295): n is a, c, g, or t
  misc_feature (2298)..(2298): n is a, c, g, or t
  misc_feature (2304)..(2304): n is a, c, g, or t
  misc_feature (2307)..(2307): n is a, c, g, or t
  misc_feature (2310)..(2310): n is a, c, g, or t
  misc_feature (2316)..(2316): n is a, c, g, or t
  misc_feature (2319)..(2319): n is a, c, g, or t
  misc_feature (2328)..(2328): n is a, c, g, or t
  misc_feature (2331)..(2331): n is a, c, g, or t
  misc_feature (2334)..(2334): n is a, c, g, or t
  misc_feature (2337)..(2337): n is a, c, g, or t
  misc_feature (2340)..(2340): n is a, c, g, or t
  misc_feature (2346)..(2346): n is a, c, g, or t
  misc_feature (2349)..(2349): n is a, c, g, or t
  misc_feature (2352)..(2352): n is a, c, g, or t
  misc_feature (2355)..(2355): n is a, c, g, or t
  misc_feature (2361)..(2361): n is a, c, g, or t
  misc_feature (2364)..(2364): n is a, c, g, or t
  misc_feature (2373)..(2373): n is a, c, g, or t
  misc_feature (2376)..(2376): n is a, c, g, or t
  misc_feature (2382)..(2382): n is a, c, g, or t
  misc_feature (2385)..(2385): n is a, c, g, or t
  misc_feature (2388)..(2388): n is a, c, g, or t
  misc_feature (2391)..(2391): n is a, c, g, or t
  misc_feature (2394)..(2394): n is a, c, g, or t
  misc_feature (2397)..(2397): n is a, c, g, or t
  misc_feature (2406)..(2406): n is a, c, g, or t
  misc_feature (2409)..(2409): n is a, c, g, or t
  misc_feature (2415)..(2415): n is a, c, g, or t
  misc_feature (2430)..(2430): n is a, c, g, or t
  misc_feature (2433)..(2433): n is a, c, g, or t
  misc_feature (2436)..(2436): n is a, c, g, or t
  misc_feature (2439)..(2439): n is a, c, g, or t
  misc_feature (2442)..(2442): n is a, c, g, or t
  misc_feature (2445)..(2445): n is a, c, g, or t
  misc_feature (2451)..(2451): n is a, c, g, or t
  misc_feature (2460)..(2460): n is a, c, g, or t
  misc_feature (2466)..(2466): n is a, c, g, or t
  misc_feature (2469)..(2469): n is a, c, g, or t
  misc_feature (2472)..(2472): n is a, c, g, or t
  misc_feature (2478)..(2478): n is a, c, g, or t
  misc_feature (2484)..(2484): n is a, c, g, or t
  misc_feature (2490)..(2490): n is a, c, g, or t
  misc_feature (2493)..(2493): n is a, c, g, or t
  misc_feature (2499)..(2499): n is a, c, g, or t
  misc_feature (2502)..(2502): n is a, c, g, or t
  misc_feature (2505)..(2505): n is a, c, g, or t
  misc_feature (2508)..(2508): n is a, c, g, or t
  misc_feature (2514)..(2514): n is a, c, g, or t
  misc_feature (2517)..(2517): n is a, c, g, or t
  misc_feature (2520)..(2520): n is a, c, g, or t
  misc_feature (2526)..(2526): n is a, c, g, or t
  misc_feature (2529)..(2529): n is a, c, g, or t
  misc_feature (2532)..(2532): n is a, c, g, or t
  misc_feature (2535)..(2535): n is a, c, g, or t
  misc_feature (2541)..(2541): n is a, c, g, or t
  misc_feature (2547)..(2547): n is a, c, g, or t
  misc_feature (2553)..(2553): n is a, c, g, or t
  misc_feature (2556)..(2556): n is a, c, g, or t
  misc_feature (2562)..(2562): n is a, c, g, or t
  misc_feature (2568)..(2568): n is a, c, g, or t
  misc_feature (2571)..(2571): n is a, c, g, or t
  misc_feature (2574)..(2574): n is a, c, g, or t
  misc_feature (2580)..(2580): n is a, c, g, or t
  misc_feature (2598)..(2598): n is a, c, g, or t
  misc_feature (2604)..(2604): n is a, c, g, or t
  misc_feature (2607)..(2607): n is a, c, g, or t
  misc_feature (2616)..(2616): n is a, c, g, or t
  misc_feature (2619)..(2619): n is a, c, g, or t
  misc_feature (2622)..(2622): n is a, c, g, or t
  misc_feature (2625)..(2625): n is a, c, g, or t
  misc_feature (2634)..(2634): n is a, c, g, or t
  misc_feature (2643)..(2643): n is a, c, g, or t
  misc_feature (2646)..(2646): n is a, c, g, or t
  misc_feature (2649)..(2649): n is a, c, g, or t
  misc_feature (2652)..(2652): n is a, c, g, or t
  misc_feature (2655)..(2655): n is a, c, g, or t
  misc_feature (2661)..(2661): n is a, c, g, or t
  misc_feature (2667)..(2667): n is a, c, g, or t
  misc_feature (2670)..(2670): n is a, c, g, or t
  misc_feature (2673)..(2673): n is a, c, g, or t
  misc_feature (2676)..(2676): n is a, c, g, or t
  misc_feature (2679)..(2679): n is a, c, g, or t
  misc_feature (2682)..(2682): n is a, c, g, or t
  misc_feature (2685)..(2685): n is a, c, g, or t
  misc_feature (2688)..(2688): n is a, c, g, or t
  misc_feature (2694)..(2694): n is a, c, g, or t
  misc_feature (2697)..(2697): n is a, c, g, or t
  misc_feature (2700)..(2700): n is a, c, g, or t
  misc_feature (2703)..(2703): n is a, c, g, or t
  misc_feature (2706)..(2706): n is a, c, g, or t
  misc_feature (2709)..(2709): n is a, c, g, or t
  misc_feature (2712)..(2712): n is a, c, g, or t
  misc_feature (2715)..(2715): n is a, c, g, or t
  misc_feature (2724)..(2724): n is a, c, g, or t
  misc_feature (2733)..(2733): n is a, c, g, or t
  misc_feature (2742)..(2742): n is a, c, g, or t
ggnwsnccnggnccnaarggngayatgggnwsnccnggnccnaarggngaymgnggnttyccnggnacnccnggnathccnggnccnytnggncayccnggnccncarggnccnaarggncaraarggnwsngtnggngayccnggnatggarggnccnatgggncarmgnggnmgngarggnccnatgggnccnmgnggngargcnggnccnccnggnwsnggngaraarggngarmgnggngcngcnggngarccnggnccncayggnccnccnggngtnccnggnwsngtnggnccnaarggnwsnwsnggnwsnccnggnccncarggnccnccnggnccngtnggnytncarggnytnmgnggngargtnggnytnccnggngtnaarggngayaarggnccnatgggnccnccnggnccnaarggngaycarggngaraarggnccnmgnggnytnacnggngarccnggnatgmgnggnytnccnggngcngtnggngarccnggngcnaarggngcnatgggnccngcnggnccngayggncaycarggnccnmgnggngarcarggnytnacnggnatgccnggnathmgnggnccnccnggnccnwsnggngayccnggnaarccnggnytnacnggnccncarggnccncarggnytnccnggnacnccnggnmgnccnggnathaarggngarccnggngcnccnggnaarathgtnacnwsngarggnwsnwsnatgytnacngtnccnggnccnccnggnccnccnggngcnatgggnccnccnggnccnccnggngcnccnggnccngcnggnccngcnggnytnccnggncaycargargtnytnaayytncarggnccnccnggnccnccnggnccnmgnggnccnccnggnccnwsnathccnggnccnccnggnccnmgnggnccnccnggngarggnytnccnggnccnccnggnccnccnggnwsnttyytnwsnaaywsngaracnttyytnwsnggnccnccnggnccnccnggnccnccnggnccnaarggngaycarggnccnccnggnccnmgnggncaycarggngarcarggnytnccnggnttywsnacnwsnggnwsnwsnwsnttyggnytnaayytncarggnccnccnggnccnccnggnccncarggnccnaarggngayaarggngayccnggngtnccnggngcnytnggnathccnwsnggnccnwsngarggnggnwsnwsnwsnacnatgtaygtnwsnggnccnccnggnccnccnggnccnccnggnccnccnggnwsnathwsnwsnwsnggncargarathcarcartayathwsngartayatgcarwsngaywsnathmgnwsntayytnwsnggngtncarggnccnccnggnccnccnggnccnccnggnccngtnacnacnathacnggngaracnttygaytaywsngarytngcnwsncaygtngtnwsntayytnmgnacnwsnggntayggngtnwsnytnttywsnwsnwsnathwsnwsngargayathytngcngtnytncarmgngaygaygtnmgncartayytnmgncartayytnatgggnccnmgnggnccnccnggnccnccnggngcnwsnggngayggnwsnytnytnwsnytngaytaygcngarytnwsnwsnmgnathytnwsntayatgwsnwsnwsnggnathwsnathggnytnccnggnccnccnggnccnccnggnytnccnggnacnwsntaygargarytnytnwsnytnytnmgnggnwsngarttymgnggnathgtnggnccnccnggnccnccnggnccnccnggnathccnggnaaygtntggwsnwsnathwsngtngargayytnwsnwsntayytncayacngcnggnytnwsnttyathccnggnccnccnggnccnccnggnccnccnggnccnmgnggnccnccnggngtnwsnggngcnytngcnacntaygcngcngaraaywsngaywsnttymgnwsngarytnathwsntayytnacnwsnccngaygtnmgnwsnttyathgtnggnccnccnggnccnccnggnccncarggnccnccnggngaywsnmgnytnytnwsnacngaygcnwsncaywsnmgnggnwsnwsnwsnwsnwsncaywsnwsnwsngtnmgnmgnggnwsnwsntaywsnwsnwsnatgwsnacnggnggnggnggngcnggnwsnytnggngcnggnggngcnttyggngargcngcnggngaymgnggnccntayggnacngayathggnccnggnggnggntayggngcngcngcngarggnggnatgtaygcnggnaayggnggnytnytnggngcngayttygcnggngayytngaytayaaygarytngcngtnmgngtnwsngarwsnatgcarmgncarggnytnytncarggnatggcntayacngtncarggnccnccnggncarccnggnccncarggnccnccnggnathwsnaargtnttywsngcntaywsnaaygtnacngcngayytnatggayttyttycaracntayggngcnathcarggnccnccnggncaraarggngaratgggnacnccnggnccnaarggngaymgnggnccngcnggnccnccnggncayccnggnccnccnggnccnmgnggncayaarggngaraarggngayaarggngaycar

SEQ ID NO: 1133 - DNA, 2073 bp, Artificial Sequence
  hCol-CNA38 (alpha1(XVIII) THD)
  misc_feature (3)..(3): n is a, c, g, or t
  misc_feature (6)..(6): n is a, c, g, or t
  misc_feature (12)..(12): n is a, c, g, or t
  misc_feature (21)..(21): n is a, c, g, or t
  misc_feature (27)..(27): n is a, c, g, or t
  misc_feature (30)..(30): n is a, c, g, or t
  misc_feature (33)..(33): n is a, c, g, or t
  misc_feature (36)..(36): n is a, c, g, or t
  misc_feature (39)..(39): n is a, c, g, or t
  misc_feature (42)..(42): n is a, c, g, or t
  misc_feature (45)..(45): n is a, c, g, or t
  misc_feature (48)..(48): n is a, c, g, or t
  misc_feature (51)..(51): n is a, c, g, or t
  misc_feature (54)..(54): n is a, c, g, or t
  misc_feature (57)..(57): n is a, c, g, or t
  misc_feature (60)..(60): n is a, c, g, or t
  misc_feature (63)..(63): n is a, c, g, or t
  misc_feature (66)..(66): n is a, c, g, or t
  misc_feature (69)..(69): n is a, c, g, or t
  misc_feature (72)..(72): n is a, c, g, or t
  misc_feature (78)..(78): n is a, c, g, or t
  misc_feature (81)..(81): n is a, c, g, or t
  misc_feature (84)..(84): n is a, c, g, or t
  misc_feature (87)..(87): n is a, c, g, or t
  misc_feature (90)..(90): n is a, c, g, or t
  misc_feature (93)..(93): n is a, c, g, or t
  misc_feature (96)..(96): n is a, c, g, or t
  misc_feature (99)..(99): n is a, c, g, or t
  misc_feature (105)..(105): n is a, c, g, or t
  misc_feature (108)..(108): n is a, c, g, or t
  misc_feature (111)..(111): n is a, c, g, or t
  misc_feature (114)..(114): n is a, c, g, or t
  misc_feature (117)..(117): n is a, c, g, or t
  misc_feature (120)..(120): n is a, c, g, or t
  misc_feature (123)..(123): n is a, c, g, or t
  misc_feature (126)..(126): n is a, c, g, or t
  misc_feature (129)..(129): n is a, c, g, or t
  misc_feature (132)..(132): n is a, c, g, or t
  misc_feature (135)..(135): n is a, c, g, or t
  misc_feature (138)..(138): n is a, c, g, or t
  misc_feature (144)..(144): n is a, c, g, or t
  misc_feature (147)..(147): n is a, c, g, or t
  misc_feature (150)..(150): n is a, c, g, or t
  misc_feature (153)..(153): n is a, c, g, or t
  misc_feature (156)..(156): n is a, c, g, or t
  misc_feature (162)..(162): n is a, c, g, or t
  misc_feature (165)..(165): n is a, c, g, or t
  misc_feature (168)..(168): n is a, c, g, or t
  misc_feature (171)..(171): n is a, c, g, or t
  misc_feature (174)..(174): n is a, c, g, or t
  misc_feature (177)..(177): n is a, c, g, or t
  misc_feature (180)..(180): n is a, c, g, or t
  misc_feature (183)..(183): n is a, c, g, or t
  misc_feature (189)..(189): n is a, c, g, or t
  misc_feature (192)..(192): n is a, c, g, or t
  misc_feature (195)..(195): n is a, c, g, or t
  misc_feature (198)..(198): n is a, c, g, or t
  misc_feature (201)..(201): n is a, c, g, or t
  misc_feature (207)..(207): n is a, c, g, or t
  misc_feature (213)..(213): n is a, c, g, or t
  misc_feature (216)..(216): n is a, c, g, or t
  misc_feature (222)..(222): n is a, c, g, or t
  misc_feature (225)..(225): n is a, c, g, or t
  misc_feature (234)..(234): n is a, c, g, or t
  misc_feature (240)..(240): n is a, c, g, or t
  misc_feature (243)..(243): n is a, c, g, or t
  misc_feature (249)..(249): n is a, c, g, or t
  misc_feature (252)..(252): n is a, c, g, or t
  misc_feature (255)..(255): n is a, c, g, or t
  misc_feature (261)..(261): n is a, c, g, or t
  misc_feature (267)..(267): n is a, c, g, or t
  misc_feature (270)..(270): n is a, c, g, or t
  misc_feature (273)..(273): n is a, c, g, or t
  misc_feature (276)..(276): n is a, c, g, or t
  misc_feature (279)..(279): n is a, c, g, or t
  misc_feature (285)..(285): n is a, c, g, or t
  misc_feature (288)..(288): n is a, c, g, or t
  misc_feature (291)..(291): n is a, c, g, or t
  misc_feature (297)..(297): n is a, c, g, or t
  misc_feature (306)..(306): n is a, c, g, or t
  misc_feature (312)..(312): n is a, c, g, or t
  misc_feature (315)..(315): n is a, c, g, or t
  misc_feature (318)..(318): n is a, c, g, or t
  misc_feature (321)..(321): n is a, c, g, or t
  misc_feature (327)..(327): n is a, c, g, or t
  misc_feature (330)..(330): n is a, c, g, or t
  misc_feature (333)..(333): n is a, c, g, or t
  misc_feature (336)..(336): n is a, c, g, or t
  misc_feature (339)..(339): n is a, c, g, or t
  misc_feature (342)..(342): n is a, c, g, or t
  misc_feature (348)..(348): n is a, c, g, or t
  misc_feature (351)..(351): n is a, c, g, or t
  misc_feature (354)..(354): n is a, c, g, or t
  misc_feature (357)..(357): n is a, c, g, or t
  misc_feature (360)..(360): n is a, c, g, or t
  misc_feature (363)..(363): n is a, c, g, or t
  misc_feature (366)..(366): n is a, c, g, or t
  misc_feature (369)..(369): n is a, c, g, or t
  misc_feature (372)..(372): n is a, c, g, or t
  misc_feature (378)..(378): n is a, c, g, or t
  misc_feature (390)..(390): n is a, c, g, or t
  misc_feature (393)..(393): n is a, c, g, or t
  misc_feature (411)..(411): n is a, c, g, or t
  misc_feature (414)..(414): n is a, c, g, or t
  misc_feature (417)..(417): n is a, c, g, or t
  misc_feature (423)..(423): n is a, c, g, or t
  misc_feature (426)..(426): n is a, c, g, or t
  misc_feature (432)..(432): n is a, c, g, or t
  misc_feature (438)..(438): n is a, c, g, or t
  misc_feature (441)..(441): n is a, c, g, or t
  misc_feature (444)..(444): n is a, c, g, or t
  misc_feature (447)..(447): n is a, c, g, or t
  misc_feature (450)..(450): n is a, c, g, or t
  misc_feature (453)..(453): n is a, c, g, or t
  misc_feature (456)..(456): n is a, c, g, or t
  misc_feature (462)..(462): n is a, c, g, or t
  misc_feature (465)..(465): n is a, c, g, or t
  misc_feature (468)..(468): n is a, c, g, or t
  misc_feature (471)..(471): n is a, c, g, or t
  misc_feature (474)..(474): n is a, c, g, or t
  misc_feature (477)..(477): n is a, c, g, or t
  misc_feature (480)..(480): n is a, c, g, or t
  misc_feature (483)..(483): n is a, c, g, or t
  misc_feature (486)..(486): n is a, c, g, or t
  misc_feature (489)..(489): n is a, c, g, or t
  misc_feature (492)..(492): n is a, c, g, or t
  misc_feature (495)..(495): n is a, c, g, or t
  misc_feature (498)..(498): n is a, c, g, or t
  misc_feature (501)..(501): n is a, c, g, or t
  misc_feature (507)..(507): n is a, c, g, or t
  misc_feature (510)..(510): n is a, c, g, or t
  misc_feature (513)..(513): n is a, c, g, or t
  misc_feature (519)..(519): n is a, c, g, or t
  misc_feature (522)..(522): n is a, c, g, or t
  misc_feature (528)..(528): n is a, c, g, or t
  misc_feature (531)..(531): n is a, c, g, or t
  misc_feature (537)..(537): n is a, c, g, or t
  misc_feature (540)..(540): n is a, c, g, or t
  misc_feature (543)..(543): n is a, c, g, or t
  misc_feature (546)..(546): n is a, c, g, or t
  misc_feature (549)..(549): n is a, c, g, or t
  misc_feature (552)..(552): n is a, c, g, or t
  misc_feature (555)..(555): n is a, c, g, or t
  misc_feature (558)..(558): n is a, c, g, or t
  misc_feature (561)..(561): n is a, c, g, or t
  misc_feature (564)..(564): n is a, c, g, or t
  misc_feature (567)..(567): n is a, c, g, or t
  misc_feature (570)..(570): n is a, c, g, or t
  misc_feature (573)..(573): n is a, c, g, or t
  misc_feature (579)..(579): n is a, c, g, or t
  misc_feature (582)..(582): n is a, c, g, or t
  misc_feature (585)..(585): n is a, c, g, or t
  misc_feature (588)..(588): n is a, c, g, or t
  misc_feature (594)..(594): n is a, c, g, or t
  misc_feature (597)..(597): n is a, c, g, or t
  misc_feature (600)..(600): n is a, c, g, or t
  misc_feature (603)..(603): n is a, c, g, or t
  misc_feature (606)..(606): n is a, c, g, or t
  misc_feature (609)..(609): n is a, c, g, or t
  misc_feature (612)..(612): n is a, c, g, or t
  misc_feature (615)..(615): n is a, c, g, or t
  misc_feature (618)..(618): n is a, c, g, or t
  misc_feature (621)..(621): n is a, c, g, or t
  misc_feature (624)..(624): n is a, c, g, or t
  misc_feature (627)..(627): n is a, c, g, or t
  misc_feature (633)..(633): n is a, c, g, or t
  misc_feature (636)..(636): n is a, c, g, or t
  misc_feature (639)..(639): n is a, c, g, or t
  misc_feature (642)..(642): n is a, c, g, or t
  misc_feature (645)..(645): n is a, c, g, or t
  misc_feature (648)..(648): n is a, c, g, or t
  misc_feature (651)..(651): n is a, c, g, or t
  misc_feature (660)..(660): n is a, c, g, or t
  misc_feature (663)..(663): n is a, c, g, or t
  misc_feature (666)..(666): n is a, c, g, or t
  misc_feature (669)..(669): n is a, c, g, or t
  misc_feature (675)..(675): n is a, c, g, or t
  misc_feature (678)..(678): n is a, c, g, or t
  misc_feature (681)..(681): n is a, c, g, or t
  misc_feature (684)..(684): n is a, c, g, or t
  misc_feature (687)..(687): n is a, c, g, or t
  misc_feature (696)..(696): n is a, c, g, or t
  misc_feature (699)..(699): n is a, c, g, or t
  misc_feature (705)..(705): n is a, c, g, or t
  misc_feature (708)..(708): n is a, c, g, or t
  misc_feature (711)..(711): n is a, c, g, or t
  misc_feature (714)..(714): n is a, c, g, or t
  misc_feature (717)..(717): n is a, c, g, or t
  misc_feature (720)..(720): n is a, c, g, or t
  misc_feature (723)..(723): n is a, c, g, or t
  misc_feature (726)..(726): n is a, c, g, or t
  misc_feature (729)..(729): n is a, c, g, or t
  misc_feature (732)..(732): n is a, c, g, or t
  misc_feature (738)..(738): n is a, c, g, or t
  misc_feature (741)..(741): n is a, c, g, or t
  misc_feature (744)..(744): n is a, c, g, or t
  misc_feature (747)..(747): n is a, c, g, or t
  misc_feature (750)..(750): n is a, c, g, or t
  misc_feature (753)..(753): n is a, c, g, or t
  misc_feature (756)..(756): n is a, c, g, or t
  misc_feature (759)..(759): n is a, c, g, or t
  misc_feature (762)..(762): n is a, c, g, or t
  misc_feature (765)..(765): n is a, c, g, or t
  misc_feature (768)..(768): n is a, c, g, or t
  misc_feature (771)..(771): n is a, c, g, or t
  misc_feature (774)..(774): n is a, c, g, or t
  misc_feature (777)..(777): n is a, c, g, or t
  misc_feature (780)..(780): n is a, c, g, or t
  misc_feature (783)..(783): n is a, c, g, or t
  misc_feature (786)..(786): n is a, c, g, or t
  misc_feature (789)..(789): n is a, c, g, or t
  misc_feature (792)..(792): n is a, c, g, or t
  misc_feature (795)..(795): n is a, c, g, or t
  misc_feature (798)..(798): n is a, c, g, or t
  misc_feature (801)..(801): n is a, c, g, or t
  misc_feature (804)..(804): n is a, c, g, or t
  misc_feature (807)..(807): n is a, c, g, or t
  misc_feature (810)..(810): n is a, c, g, or t
  misc_feature (813)..(813): n is a, c, g, or t
  misc_feature (816)..(816): n is a, c, g, or t
  misc_feature (819)..(819): n is a, c, g, or t
  misc_feature (822)..(822): n is a, c, g, or t
  misc_feature (840)..(840): n is a, c, g, or t
  misc_feature (843)..(843): n is a, c, g, or t
  misc_feature (846)..(846): n is a, c, g, or t
  misc_feature (849)..(849): n is a, c, g, or t
  misc_feature (852)..(852): n is a, c, g, or t
  misc_feature (861)..(861): n is a, c, g, or t
  misc_feature (864)..(864): n is a, c, g, or t
  misc_feature (867)..(867): n is a, c, g, or t
  misc_feature (870)..(870): n is a, c, g, or t
  misc_feature (873)..(873): n is a, c, g, or t
  misc_feature (876)..(876): n is a, c, g, or t
  misc_feature (882)..(882): n is a, c, g, or t
  misc_feature (885)..(885): n is a, c, g, or t
  misc_feature (891)..(891): n is a, c, g, or t
  misc_feature (894)..(894): n is a, c, g, or t
  misc_feature (897)..(897): n is a, c, g, or t
  misc_feature (900)..(900): n is a, c, g, or t
  misc_feature (903)..(903): n is a, c, g, or t
  misc_feature (906)..(906): n is a, c, g, or t
  misc_feature (909)..(909): n is a, c, g, or t
  misc_feature (912)..(912): n is a, c, g, or t
  misc_feature (918)..(918): n is a, c, g, or t
  misc_feature (924)..(924): n is a, c, g, or t
  misc_feature (927)..(927): n is a, c, g, or t
  misc_feature (930)..(930): n is a, c, g, or t
  misc_feature (933)..(933): n is a, c, g, or t
  misc_feature (936)..(936): n is a, c, g, or t
  misc_feature (939)..(939): n is a, c, g, or t
  misc_feature (942)..(942): n is a, c, g, or t
  misc_feature (945)..(945): n is a, c, g, or t
  misc_feature (948)..(948): n is a, c, g, or t
  misc_feature (954)..(954): n is a, c, g, or t
  misc_feature (960)..(960): n is a, c, g, or t
  misc_feature (963)..(963): n is a, c, g, or t
  misc_feature (966)..(966): n is a, c, g, or t
  misc_feature (972)..(972): n is a, c, g, or t
  misc_feature (975)..(975): n is a, c, g, or t
  misc_feature (978)..(978): n is a, c, g, or t
  misc_feature (981)..(981): n is a, c, g, or t
  misc_feature (987)..(987): n is a, c, g, or t
  misc_feature (990)..(990): n is a, c, g, or t
  misc_feature (993)..(993): n is a, c, g, or t
  misc_feature (996)..(996): n is a, c, g, or t
  misc_feature (999)..(999): n is a, c, g, or t
  misc_feature (1002)..(1002): n is a, c, g, or t
  misc_feature (1008)..(1008): n is a, c, g, or t
  misc_feature (1014)..(1014): n is a, c, g, or t
  misc_feature (1017)..(1017): n is a, c, g, or t
  misc_feature (1020)..(1020): n is a, c, g, or t
  misc_feature (1026)..(1026): n is a, c, g, or t
  misc_feature (1029)..(1029): n is a, c, g, or t
  misc_feature (1035)..(1035): n is a, c, g, or t
  misc_feature (1041)..(1041): n is a, c, g, or t
  misc_feature (1044)..(1044): n is a, c, g, or t
  misc_feature (1047)..(1047): n is a, c, g, or t
  misc_feature (1050)..(1050): n is a, c, g, or t
  misc_feature (1053)..(1053): n is a, c, g, or t
  misc_feature (1062)..(1062): n is a, c, g, or t
  misc_feature (1068)..(1068): n is a, c, g, or t
  misc_feature (1071)..(1071): n is a, c, g, or t
  misc_feature (1080)..(1080): n is a, c, g, or t
  misc_feature (1083)..(1083): n is a, c, g, or t
  misc_feature (1086)..(1086): n is a, c, g, or t
  misc_feature (1092)..(1092): n is a, c, g, or t
  misc_feature (1095)..(1095): n is a, c, g, or t
  misc_feature (1098)..(1098): n is a, c, g, or t
  misc_feature (1101)..(1101): n is a, c, g, or t
  misc_feature (1104)..(1104): n is a, c, g, or t
  misc_feature (1107)..(1107): n is a, c, g, or t
  misc_feature (1110)..(1110): n is a, c, g, or t
  misc_feature (1113)..(1113): n is a, c, g, or t
  misc_feature (1116)..(1116): n is a, c, g, or t
  misc_feature (1119)..(1119): n is a, c, g, or t
  misc_feature (1122)..(1122): n is a, c, g, or t
  misc_feature (1125)..(1125): n is a, c, g, or t
  misc_feature (1128)..(1128): n is a, c, g, or t
  misc_feature (1131)..(1131): n is a, c, g, or t
  misc_feature (1137)..(1137): n is a, c, g, or t
  misc_feature (1140)..(1140): n is a, c, g, or t
  misc_feature (1152)..(1152): n is a, c, g, or t
  misc_feature (1155)..(1155): n is a, c, g, or t
  misc_feature (1158)..(1158): n is a, c, g, or t
  misc_feature (1161)..(1161): n is a, c, g, or t
  misc_feature (1164)..(1164): n is a, c, g, or t
  misc_feature (1167)..(1167): n is a, c, g, or t
  misc_feature (1170)..(1170): n is a, c, g, or t
  misc_feature (1173)..(1173): n is a, c, g, or t
  misc_feature (1176)..(1176): n is a, c, g, or t
  misc_feature (1182)..(1182): n is a, c, g, or t
  misc_feature (1185)..(1185): n is a, c, g, or t
  misc_feature (1188)..(1188): n is a, c, g, or t
  misc_feature (1191)..(1191): n is a, c, g, or t
  misc_feature (1197)..(1197): n is a, c, g, or t
  misc_feature (1200)..(1200): n is a, c, g, or t
  misc_feature (1206)..(1206): n is a, c, g, or t
  misc_feature (1209)..(1209): n is a, c, g, or t
  misc_feature (1212)..(1212): n is a, c, g, or t
  misc_feature (1215)..(1215): n is a, c, g, or t
  misc_feature (1218)..(1218): n is a, c, g, or t
  misc_feature (1221)..(1221): n is a, c, g, or t
  misc_feature (1227)..(1227): n is a, c, g, or t
  misc_feature (1233)..(1233): n is a, c, g, or t
  misc_feature (1236)..(1236): n is a, c, g, or t
  misc_feature (1239)..(1239): n is a, c, g, or t
  misc_feature (1245)..(1245): n is a, c, g, or t
  misc_feature (1251)..(1251): n is a, c, g, or t
  misc_feature (1254)..(1254): n is a, c, g, or t
  misc_feature (1257)..(1257): n is a, c, g, or t
  misc_feature (1260)..(1260): n is a, c, g, or t
  misc_feature (1263)..(1263): n is a, c, g, or t
  misc_feature (1266)..(1266): n is a, c, g, or t
  misc_feature (1272)..(1272): n is a, c, g, or t
  misc_feature (1281)..(1281): n is a, c, g, or t
  misc_feature (1287)..(1287): n is a, c, g, or t
  misc_feature (1290)..(1290): n is a, c, g, or t
  misc_feature (1293)..(1293): n is a, c, g, or t
  misc_feature (1302)..(1302): n is a, c, g, or t
  misc_feature (1305)..(1305): n is a, c, g, or t
  misc_feature (1311)..(1311): n is a, c, g, or t
  misc_feature (1314)..(1314): n is a, c, g, or t
  misc_feature (1317)..(1317): n is a, c, g, or t
  misc_feature (1320)..(1320): n is a, c, g, or t
  misc_feature (1323)..(1323): n is a, c, g, or t
  misc_feature (1326)..(1326): n is a, c, g, or t
  misc_feature (1329)..(1329): n is a, c, g, or t
  misc_feature (1338)..(1338): n is a, c, g, or t
  misc_feature (1341)..(1341): n is a, c, g, or t
  misc_feature (1347)..(1347): n is a, c, g, or t
  misc_feature (1353)..(1353): n is a, c, g, or t
  misc_feature (1356)..(1356): n is a, c, g, or t
  misc_feature (1362)..(1362): n is a, c, g, or t
  misc_feature (1365)..(1365): n is a, c, g, or t
  misc_feature (1368)..(1368): n is a, c, g, or t
  misc_feature (1371)..(1371): n is a, c, g, or t
  misc_feature (1374)..(1374): n is a, c, g, or t
  misc_feature (1377)..(1377): n is a, c, g, or t
  misc_feature (1383)..(1383): n is a, c, g, or t
  misc_feature (1386)..(1386): n is a, c, g, or t
  misc_feature (1389)..(1389): n is a, c, g, or t
  misc_feature (1392)..(1392): n is a, c, g, or t
  misc_feature (1401)..(1401): n is a, c, g, or t
  misc_feature (1410)..(1410): n is a, c, g, or t
  misc_feature (1416)..(1416): n is a, c, g, or t
  misc_feature (1419)..(1419): n is a, c, g, or t
  misc_feature (1422)..(1422): n is a, c, g, or t
  misc_feature (1425)..(1425): n is a, c, g, or t
  misc_feature (1428)..(1428): n is a, c, g, or t
  misc_feature (1431)..(1431): n is a, c, g, or t
  misc_feature (1434)..(1434): n is a, c, g, or t
  misc_feature (1437)..(1437): n is a, c, g, or t
  misc_feature (1446)..(1446): n is a, c, g, or t
  misc_feature (1449)..(1449): n is a, c, g, or t
  misc_feature (1455)..(1455): n is a, c, g, or t
  misc_feature (1464)..(1464): n is a, c, g, or t
  misc_feature (1470)..(1470): n is a, c, g, or t
  misc_feature (1473)..(1473): n is a, c, g, or t
  misc_feature (1479)..(1479): n is a, c, g, or t
  misc_feature (1482)..(1482): n is a, c, g, or t
  misc_feature (1485)..(1485): n is a, c, g, or t
  misc_feature (1488)..(1488): n is a, c, g, or t
  misc_feature (1494)..(1494): n is a, c, g, or t
  misc_feature (1500)..(1500): n is a, c, g, or t
  misc_feature (1503)..(1503): n is a, c, g, or t
  misc_feature (1509)..(1509): n is a, c, g, or t
  misc_feature (1512)..(1512): n is a, c, g, or t
  misc_feature (1515)..(1515): n is a, c, g, or t
  misc_feature (1518)..(1518): n is a, c, g, or t
  misc_feature (1521)..(1521): n is a, c, g, or t
  misc_feature (1524)..(1524): n is a, c, g, or t
  misc_feature (1527)..(1527): n is a, c, g, or t
  misc_feature (1530)..(1530): n is a, c, g, or t
  misc_feature (1533)..(1533): n is a, c, g, or t
  misc_feature (1536)..(1536): n is a, c, g, or t
  misc_feature (1539)..(1539): n is a, c, g, or t
  misc_feature (1542)..(1542): n is a, c, g, or t
  misc_feature (1545)..(1545): n is a, c, g, or t
  misc_feature (1548)..(1548): n is a, c, g, or t
  misc_feature (1551)..(1551): n is a, c, g, or t
  misc_feature (1554)..(1554): n is a, c, g, or t
  misc_feature (1557)..(1557): n is a, c, g, or t
  misc_feature (1566)..(1566): n is a, c, g, or t
  misc_feature (1572)..(1572): n is a, c, g, or t
  misc_feature (1578)..(1578): n is a, c, g, or t
  misc_feature (1584)..(1584): n is a, c, g, or t
  misc_feature (1587)..(1587): n is a, c, g, or t
  misc_feature (1590)..(1590): n is a, c, g, or t
  misc_feature (1593)..(1593): n is a, c, g, or t
  misc_feature (1596)..(1596): n is a, c, g, or t
  misc_feature (1599)..(1599): n is a, c, g, or t
  misc_feature (1602)..(1602): n is a, c, g, or t
  misc_feature (1605)..(1605): n is a, c, g, or t
  misc_feature (1608)..(1608): n is a, c, g, or t
  misc_feature (1611)..(1611): n is a, c, g, or t
  misc_feature (1614)..(1614): n is a, c, g, or t
  misc_feature (1623)..(1623): n is a, c, g, or t
  misc_feature (1626)..(1626): n is a, c, g, or t
  misc_feature (1629)..(1629): n is a, c, g, or t
  misc_feature (1632)..(1632): n is a, c, g, or t
  misc_feature (1635)..(1635): n is a, c, g, or t
  misc_feature (1641)..(1641): n is a, c, g, or t
  misc_feature (1644)..(1644): n is a, c, g, or t
  misc_feature (1650)..(1650): n is a, c, g, or t
  misc_feature (1656)..(1656): n is a, c, g, or t
  misc_feature (1659)..(1659): n is a, c, g, or t
  misc_feature (1662)..(1662): n is a, c, g, or t
  misc_feature (1665)..(1665): n is a, c, g, or t
  misc_feature (1668)..(1668): n is a, c, g, or t
  misc_feature (1671)..(1671): n is a, c, g, or t
  misc_feature (1674)..(1674): n is a, c, g, or t
  misc_feature (1677)..(1677): n is a, c, g, or t
  misc_feature (1686)..(1686): n is a, c, g, or t
  misc_feature (1698)..(1698): n is a, c, g, or t
  misc_feature (1704)..(1704): n is a, c, g, or t
  misc_feature (1710)..(1710): n is a, c, g, or t
  misc_feature (1722)..(1722): n is a, c, g, or t
  misc_feature (1731)..(1731): n is a, c, g, or t
  misc_feature (1737)..(1737): n is a, c, g, or t
  misc_feature (1740)..(1740): n is a, c, g, or t
  misc_feature (1746)..(1746): n is a, c, g, or t
  misc_feature (1749)..(1749): n is a, c, g, or t
  misc_feature (1758)..(1758): n is a, c, g, or t
  misc_feature (1764)..(1764): n is a, c, g, or t
  misc_feature (1767)..(1767): n is a, c, g, or t
  misc_feature (1773)..(1773): n is a, c, g, or t
  misc_feature (1776)..(1776): n is a, c, g, or t
  misc_feature (1779)..(1779): n is a, c, g, or t
  misc_feature (1782)..(1782): n is a, c, g, or t
  misc_feature (1785)..(1785): n is a, c, g, or t
  misc_feature (1794)..(1794): n is a, c, g, or t
  misc_feature (1797)..(1797): n is a, c, g, or t
  misc_feature (1800)..(1800): n is a, c, g, or t
  misc_feature (1803)..(1803): n is a, c, g, or t
  misc_feature (1806)..(1806): n is a, c, g, or t
  misc_feature (1809)..(1809): n is a, c, g, or t
  misc_feature (1812)..(1812): n is a, c, g, or t
  misc_feature (1815)..(1815): n is a, c, g, or t
  misc_feature (1818)..(1818): n is a, c, g, or t
  misc_feature (1821)..(1821): n is a, c, g, or t
  misc_feature (1824)..(1824): n is a, c, g, or t
  misc_feature (1827)..(1827): n is a, c, g, or t
  misc_feature (1830)..(1830): n is a, c, g, or t
  misc_feature (1833)..(1833): n is a, c, g, or t
  misc_feature (1836)..(1836): n is a, c, g, or t
  misc_feature (1839)..(1839): n is a, c, g, or t
  misc_feature (1842)..(1842): n is a, c, g, or t
  misc_feature (1845)..(1845): n is a, c, g, or t
  misc_feature (1851)..(1851): n is a, c, g, or t
  misc_feature (1854)..(1854): n is a, c, g, or t
  misc_feature (1860)..(1860): n is a, c, g, or t
  misc_feature (1863)..(1863): n is a, c, g, or t
  misc_feature (1866)..(1866): n is a, c, g, or t
  misc_feature (1872)..(1872): n is a, c, g, or t
  misc_feature (1878)..(1878): n is a, c, g, or t
  misc_feature (1884)..(1884): n is a, c, g, or t
  misc_feature (1887)..(1887): n is a, c, g, or t
  misc_feature (1893)..(1893): n is a, c, g, or t
  misc_feature (1896)..(1896): n is a, c, g, or t
  misc_feature (1899)..(1899): n is a, c, g, or t
  misc_feature (1902)..(1902): n is a, c, g, or t
  misc_feature (1905)..(1905): n is a, c, g, or t
  misc_feature (1908)..(1908): n is a, c, g, or t
  misc_feature (1914)..(1914): n is a, c, g, or t
  misc_feature (1917)..(1917): n is a, c, g, or t
  misc_feature (1920)..(1920): n is a, c, g, or t
  misc_feature (1923)..(1923): n is a, c, g, or t
  misc_feature (1929)..(1929): n is a, c, g, or t
  misc_feature (1938)..(1938): n is a, c, g, or t
  misc_feature (1941)..(1941): n is a, c, g, or t
  misc_feature (1947)..(1947): n is a, c, g, or t
  misc_feature (1950)..(1950): n is a, c, g, or t
  misc_feature (1953)..(1953): n is a, c, g, or t
  misc_feature (1956)..(1956): n is a, c, g, or t
  misc_feature (1959)..(1959): n is a, c, g, or t
  misc_feature (1962)..(1962): n is a, c, g, or t
  misc_feature (1965)..(1965): n is a, c, g, or t
  misc_feature (1968)..(1968): n is a, c, g, or t
  misc_feature (1971)..(1971): n is a, c, g, or t
  misc_feature (1974)..(1974): n is a, c, g, or t
  misc_feature (1977)..(1977): n is a, c, g, or t
  misc_feature (1980)..(1980): n is a, c, g, or t
  misc_feature (1983)..(1983): n is a, c, g, or t
  misc_feature (1989)..(1989): n is a, c, g, or t
  misc_feature (1992)..(1992): n is a, c, g, or t
  misc_feature (1995)..(1995): n is a, c, g, or t
  misc_feature (2001)..(2001): n is a, c, g, or t
  misc_feature (2007)..(2007): n is a, c, g, or t
  misc_feature (2013)..(2013): n is a, c, g, or t
  misc_feature (2016)..(2016): n is a, c, g, or t
  misc_feature (2019)..(2019): n is a, c, g, or t
  misc_feature (2022)..(2022): n is a, c, g, or t
  misc_feature (2025)..(2025): n is a, c, g, or t
  misc_feature (2028)..(2028): n is a, c, g, or t
  misc_feature (2031)..(2031): n is a, c, g, or t
  misc_feature (2034)..(2034): n is a, c, g, or t
  misc_feature (2037)..(2037): n is a, c, g, or t
  misc_feature (2040)..(2040): n is a, c, g, or t
  misc_feature (2043)..(2043): n is a, c, g, or t
  misc_feature (2046)..(2046): n is a, c, g, or t
  misc_feature (2049)..(2049): n is a, c, g, or t
  misc_feature (2052)..(2052): n is a, c, g, or t
  misc_feature (2055)..(2055): n is a, c, g, or t
  misc_feature (2058)..(2058): n is a, c, g, or t
  misc_feature (2061)..(2061): n is a, c, g, or t
  misc_feature (2067)..(2067): n is a, c, g, or t
  misc_feature (2070)..(2070): n is a, c, g, or t
  misc_feature (2073)..(2073): n is a, c, g, or t
ggnytnaarggncaraarggngarccnggngtnccnggnccnccnggnmgngcnggnccnccnggnwsnccntgyytnccnggnccnccnggnytnccntgyccngtnwsnccnytnggnccngcnggnccngcnytncaracngtnccnggnccncarggnccnccnggnccnccnggnmgngayggnacnccnggnmgngayggngarccnggngayccnggngargayggnaarccnggngayacnggnccncarggnttyccnggnacnccnggngaygtnggnccnaarggngayaarggngayccnggngtnggngarmgnggnccnccnggnccncarggnccnccnggnccnccnggnccnwsnttymgncaygayaarytnacnttyathgayatggarggnwsnggnttyggnggngayytngargcnytnmgnggnccnmgnggnttyccnggnccnccnggnccnccnggngtnccnggnytnccnggngarccnggnmgnttyggngtnaaywsnwsngaygtnccnggnccngcnggnytnccnggngtnccnggnmgngarggnccnccnggnttyccnggnytnccnggnccnccnggnccnccnggnmgngarggnccnccnggnmgnacnggncaraarggnwsnytnggngargcnggngcnccnggncayaarggnwsnaarggngcnccnggnccngcnggngcnmgnggngarwsnggnytngcnggngcnccnggnccngcnggnccnccnggnccnccnggnccnccnggnccnccnggnccnggnytnccngcnggnttygaygayatggarggnwsnggnggnccnttytggwsnacngcnmgnwsngcngayggnccncarggnccnccnggnytnccnggnytnaarggngayccnggngtnccnggnytnccnggngcnaarggngargtnggngcngayggngtnccnggnttyccnggnytnccnggnmgngarggnathgcnggnccncarggnccnaarggngaymgnggnwsnmgnggngaraarggngayccnggnaargayggngtnggncarccnggnytnccnggnccnccnggnccnccnggnccngtngtntaygtnwsngarcargayggnwsngtnytnwsngtnccnggnccngarggnmgnccnggnttygcnggnttyccnggnccngcnggnccnaarggnaayytnggnwsnaarggngarmgnggnwsnccnggnccnaarggngaraarggngarccnggnwsnathttywsnccngayggnggngcnytnggnccngcncaraarggngcnaarggngarccnggnttymgnggnccnccnggnccntayggnmgnccnggntayaarggngarathggnttyccnggnmgnccnggnmgnccnggnatgaayggnytnaarggngaraarggngarccnggngaygcnwsnytnggnttyggnatgmgnggnatgccnggnccnccnggnccnccnggnccnccnggnccnccnggnacnccngtntaygaywsnaaygtnttygcngarwsnwsnmgnccnggnccnccnggnytnccnggnaaycarggnccnccnggnccnaarggngcnaarggngargtnggnccnccnggnccnccnggncarttyccnttygayttyytncarytngargcngaratgaarggngaraarggngaymgnggngaygcnggncaraarggngarmgnggngarccnggnggnggnggnttyttyggnwsnwsnytnccnggnccnccnggnccnccnggnccnccnggnccnmgnggntayccnggnathccnggnccnaarggngarwsnathmgnggncarccnggnccnccnggnccncarggnccnccnggnathggntaygarggnmgncarggnccnccnggnccnccnggnccnccnggnccnccnwsnttyccnggnccncaymgncaracnathwsngtnccnggnccnccnggnccnccnggnccnccnggnccnccnggnacnatgggngcnwsn

SEQ ID NO: 1134 - DNA, 2460 bp, Artificial Sequence
  hCol-CNA39 (alpha1(XIX) THD)
  misc_feature (3)..(3): n is a, c, g, or t
  misc_feature (9)..(9): n is a, c, g, or t
  misc_feature (12)..(12): n is a, c, g, or t
  misc_feature (15)..(15): n is a, c, g, or t
  misc_feature (18)..(18): n is a, c, g, or t
  misc_feature (21)..(21): n is a, c, g, or t
  misc_feature (24)..(24): n is a, c, g, or t
  misc_feature (27)..(27): n is a, c, g, or t
  misc_feature (30)..(30): n is a, c, g, or t
  misc_feature (33)..(33): n is a, c, g, or t
  misc_feature (36)..(36): n is a, c, g, or t
  misc_feature (39)..(39): n is a, c, g, or t
  misc_feature (48)..(48): n is a, c, g, or t
  misc_feature (57)..(57): n is a, c, g, or t
  misc_feature (63)..(63): n is a, c, g, or t
  misc_feature (66)..(66): n is a, c, g, or t
  misc_feature (75)..(75): n is a, c, g, or t
  misc_feature (78)..(78): n is a, c, g, or t
  misc_feature (84)..(84): n is a, c, g, or t
  misc_feature (87)..(87): n is a, c, g, or t
  misc_feature (90)..(90): n is a, c, g, or t
  misc_feature (93)..(93): n is a, c, g, or t
  misc_feature (99)..(99): n is a, c, g, or t
  misc_feature (102)..(102): n is a, c, g, or t
  misc_feature (111)..(111): n is a, c, g, or t
  misc_feature (120)..(120): n is a, c, g, or t
  misc_feature (129)..(129): n is a, c, g, or t
  misc_feature (132)..(132): n is a, c, g, or t
  misc_feature (138)..(138): n is a, c, g, or t
  misc_feature (144)..(144): n is a, c, g, or t
  misc_feature (147)..(147): n is a, c, g, or t
  misc_feature (156)..(156): n is a, c, g, or t
  misc_feature (165)..(165): n is a, c, g, or t
  misc_feature (174)..(174): n is a, c, g, or t
  misc_feature (180)..(180): n is a, c, g, or t
  misc_feature (183)..(183): n is a, c, g, or t
  misc_feature (186)..(186): n is a, c, g, or t
  misc_feature (189)..(189): n is a, c, g, or t
  misc_feature (192)..(192): n is a, c, g, or t
  misc_feature (195)..(195): n is a, c, g, or t
  misc_feature (201)..(201): n is a, c, g, or t
  misc_feature (210)..(210): n is a, c, g, or t
  misc_feature (213)..(213): n is a, c, g, or t
  misc_feature (219)..(219): n is a, c, g, or t
  misc_feature (225)..(225): n is a, c, g, or t
  misc_feature (228)..(228): n is a, c, g, or t
  misc_feature (231)..(231): n is a, c, g, or t
  misc_feature (237)..(237): n is a, c, g, or t
  misc_feature (240)..(240): n is a, c, g, or t
  misc_feature (243)..(243): n is a, c, g, or t
  misc_feature (246)..(246): n is a, c, g, or t
  misc_feature (249)..(249): n is a, c, g, or t
  misc_feature (255)..(255): n is a, c, g, or t
  misc_feature (264)..(264): n is a, c, g, or t
  misc_feature (270)..(270): n is a, c, g, or t
  misc_feature (273)..(273): n is a, c, g, or t
  misc_feature (276)..(276): n is a, c, g, or t
  misc_feature (279)..(279): n is a, c, g, or t
  misc_feature (282)..(282): n is a, c, g, or t
  misc_feature (285)..(285): n is a, c, g, or t
  misc_feature (288)..(288): n is a, c, g, or t
  misc_feature (291)..(291): n is a, c, g, or t
  misc_feature (294)..(294): n is a, c, g, or t
  misc_feature (297)..(297): n is a, c, g, or t
  misc_feature (300)..(300): n is a, c, g, or t
  misc_feature (303)..(303): n is a, c, g, or t
  misc_feature (306)..(306): n is a, c, g, or t
  misc_feature (309)..(309): n is a, c, g, or t
  misc_feature (318)..(318): n is a, c, g, or t
  misc_feature (321)..(321): n is a, c, g, or t
  misc_feature (327)..(327): n is a, c, g, or t
  misc_feature (330)..(330): n is a, c, g, or t
  misc_feature (333)..(333): n is a, c, g, or t
  misc_feature (336)..(336): n is a, c, g, or t
  misc_feature (345)..(345): n is a, c, g, or t
  misc_feature (351)..(351): n is a, c, g, or t
  misc_feature (354)..(354): n is a, c, g, or t
  misc_feature (357)..(357): n is a, c, g, or t
  misc_feature (360)..(360): n is a, c, g, or t
  misc_feature (363)..(363): n is a, c, g, or t
  misc_feature (369)..(369): n is a, c, g, or t
  misc_feature (372)..(372): n is a, c, g, or t
  misc_feature (375)..(375): n is a, c, g, or t
  misc_feature (378)..(378): n is a, c, g, or t
  misc_feature (381)..(381): n is a, c, g, or t
  misc_feature (387)..(387): n is a, c, g, or t
  misc_feature (390)..(390): n is a, c, g, or t
  misc_feature (393)..(393): n is a, c, g, or t
  misc_feature (396)..(396): n is a, c, g, or t
  misc_feature (399)..(399): n is a, c, g, or t
  misc_feature (402)..(402): n is a, c, g, or t
  misc_feature (405)..(405): n is a, c, g, or t
  misc_feature (408)..(408): n is a, c, g, or t
  misc_feature (411)..(411): n is a, c, g, or t
  misc_feature (414)..(414): n is a, c, g, or t
  misc_feature (417)..(417): n is a, c, g, or t
  misc_feature (426)..(426): n is a, c, g, or t
  misc_feature (438)..(438): n is a, c, g, or t
  misc_feature (441)..(441): n is a, c, g, or t
  misc_feature (444)..(444): n is a, c, g, or t
  misc_feature (447)..(447): n is a, c, g, or t
  misc_feature (471)..(471): n is a, c, g, or t
  misc_feature (489)..(489): n is a, c, g, or t
  misc_feature (492)..(492): n is a, c, g, or t
  misc_feature (495)..(495): n is a, c, g, or t
  misc_feature (498)..(498): n is a, c, g, or t
  misc_feature (504)..(504): n is a, c, g, or t
  misc_feature (513)..(513): n is a, c, g, or t
  misc_feature (519)..(519): n is a, c, g, or t
  misc_feature (522)..(522): n is a, c, g, or t
  misc_feature (525)..(525): n is a, c, g, or t
  misc_feature (528)..(528): n is a, c, g, or t
  misc_feature (531)..(531): n is a, c, g, or t
  misc_feature (537)..(537): n is a, c, g, or t
  misc_feature (540)..(540): n is a, c, g, or t
  misc_feature (543)..(543): n is a, c, g, or t
  misc_feature (546)..(546): n is a, c, g, or t
  misc_feature (549)..(549): n is a, c, g, or t
  misc_feature (552)..(552): n is a, c, g, or t
  misc_feature (558)..(558): n is a, c, g, or t
  misc_feature (567)..(567): n is a, c, g, or t
  misc_feature (573)..(573): n is a, c, g, or t
  misc_feature (576)..(576): n is a, c, g, or t
  misc_feature (582)..(582): n is a, c, g, or t
  misc_feature (588)..(588): n is a, c, g, or t
  misc_feature (594)..(594): n is a, c, g, or t
  misc_feature (603)..(603): n is a, c, g, or t
  misc_feature (609)..(609): n is a, c, g, or t
  misc_feature (612)..(612): n is a, c, g, or t
  misc_feature (618)..(618): n is a, c, g, or t
  misc_feature (621)..(621): n is a, c, g, or t
  misc_feature (624)..(624): n is a, c, g, or t
  misc_feature (630)..(630): n is a, c, g, or t
  misc_feature (633)..(633): n is a, c, g, or t
  misc_feature (639)..(639): n is a, c, g, or t
  misc_feature (642)..(642): n is a, c, g, or t
  misc_feature (648)..(648): n is a, c, g, or t
  misc_feature (654)..(654): n is a, c, g, or t
  misc_feature (657)..(657): n is a, c, g, or t
  misc_feature (663)..(663): n is a, c, g, or t
  misc_feature (666)..(666): n is a, c, g, or t
  misc_feature (669)..(669): n is a, c, g, or t
  misc_feature (672)..(672): n is a, c, g, or t
  misc_feature (675)..(675): n is a, c, g, or t
  misc_feature (678)..(678): n is a, c, g, or t
  misc_feature (684)..(684): n is a, c, g, or t
  misc_feature (687)..(687): n is a, c, g, or t
  misc_feature (690)..(690): n is a, c, g, or t
  misc_feature (693)..(693): n is a, c, g, or t
  misc_feature (696)..(696): n is a, c, g, or t
  misc_feature (702)..(702): n is a, c, g, or t
  misc_feature (711)..(711): n is a, c, g, or t
  misc_feature (714)..(714): n is a, c, g, or t
  misc_feature (717)..(717): n is a, c, g, or t
  misc_feature (720)..(720): n is a, c, g, or t
  misc_feature (723)..(723): n is a, c, g, or t
  misc_feature (729)..(729): n is a, c, g, or t
  misc_feature (732)..(732): n is a, c, g, or t
  misc_feature (735)..(735): n is a, c, g, or t
  misc_feature (738)..(738): n is a, c, g, or t
  misc_feature (741)..(741): n is a, c, g, or t
  misc_feature (744)..(744): n is a, c, g, or t
  misc_feature (747)..(747): n is a, c, g, or t
  misc_feature (753)..(753): n is a, c, g, or t
  misc_feature (756)..(756): n is a, c, g, or t
  misc_feature (759)..(759): n is a, c, g, or t
  misc_feature (762)..(762): n is a, c, g, or t
  misc_feature (765)..(765): n is a, c, g, or t
  misc_feature (774)..(774): n is a, c, g, or t
  misc_feature (780)..(780): n is a, c, g, or t
  misc_feature (783)..(783): n is a, c, g, or t
  misc_feature (792)..(792): n is a, c, g, or t
  misc_feature (801)..(801): n is a, c, g, or t
  misc_feature (810)..(810): n is a, c, g, or t
  misc_feature (816)..(816): n is a, c, g, or t
  misc_feature (819)..(819): n is a, c, g, or t
  misc_feature (822)..(822): n is a, c, g, or t
  misc_feature (831)..(831): n is a, c, g, or t
  misc_feature (834)..(834): n is a, c, g, or t
  misc_feature (837)..(837): n is a, c, g, or t
  misc_feature (840)..(840): n is a, c, g, or t
  misc_feature (843)..(843): n is a, c, g, or t
  misc_feature (846)..(846): n is a, c, g, or t
  misc_feature (849)..(849): n is a, c, g, or t
  misc_feature (852)..(852): n is a, c, g, or t
  misc_feature (858)..(858): n is a, c, g, or t
  misc_feature (864)..(864): n is a, c, g, or t
  misc_feature (867)..(867): n is a, c, g, or t
  misc_feature (870)..(870): n is a, c, g, or t
  misc_feature (873)..(873): n is a, c, g, or t
  misc_feature (876)..(876): n is a, c, g, or t
  misc_feature (882)..(882): n is a, c, g, or t
  misc_feature (885)..(885): n is a, c, g, or t
  misc_feature (888)..(888): n is a, c, g, or t
  misc_feature (891)..(891): n is a, c, g, or t
  misc_feature (897)..(897): n is a, c, g, or t
  misc_feature (900)..(900): n is a, c, g, or t
  misc_feature (903)..(903): n is a, c, g, or t
  misc_feature (909)..(909): n is a, c, g, or t
  misc_feature (915)..(915): n is a, c, g, or t
  misc_feature (918)..(918): n is a, c, g, or t
  misc_feature (921)..(921): n is a, c, g, or t
  misc_feature (924)..(924): n is a, c, g, or t
  misc_feature (927)..(927): n is a, c, g, or t
  misc_feature (930)..(930): n is a, c, g, or t
  misc_feature (933)..(933): n is a, c, g, or t
  misc_feature (936)..(936): n is a, c, g, or t
  misc_feature (939)..(939): n is a, c, g, or t
  misc_feature (945)..(945): n is a, c, g, or t
  misc_feature (951)..(951): n is a, c, g, or t
  misc_feature (954)..(954): n is a, c, g, or t
  misc_feature (957)..(957): n is a, c, g, or t
  misc_feature (960)..(960): n is a, c, g, or t
  misc_feature (963)..(963): n is a, c, g, or t
  misc_feature (966)..(966): n is a, c, g, or t
  misc_feature (972)..(972): n is a, c, g, or t
  misc_feature (975)..(975): n is a, c, g, or t
  misc_feature (978)..(978): n is a, c, g, or t
  misc_feature (981)..(981): n is a, c, g, or t
  misc_feature (990)..(990): n is a, c, g, or t
  misc_feature (993)..(993): n is a, c, g, or t
  misc_feature (999)..(999): n is a, c, g, or t
  misc_feature (1005)..(1005): n is a, c, g, or t
  misc_feature (1011)..(1011): n is a, c, g, or t
  misc_feature (1014)..(1014): n is a, c, g, or t
  misc_feature (1017)..(1017): n is a, c, g, or t
  misc_feature (1020)..(1020): n is a, c, g, or t
  misc_feature (1023)..(1023): n is a, c, g, or t
  misc_feature (1026)..(1026): n is a, c, g, or t
  misc_feature (1032)..(1032): n is a, c, g, or t
  misc_feature (1035)..(1035): n is a, c, g, or t
  misc_feature (1038)..(1038): n is a, c, g, or t
  misc_feature (1041)..(1041): n is a, c, g, or t
  misc_feature (1047)..(1047): n is a, c, g, or t
  misc_feature (1050)..(1050): n is a, c, g, or t
  misc_feature (1059)..(1059): n is a, c, g, or t
  misc_feature (1062)..(1062): n is a, c, g, or t
  misc_feature (1065)..(1065): n is a, c, g, or t
  misc_feature (1068)..(1068): n is a, c, g, or t
  misc_feature (1071)..(1071): n is a, c, g, or t
  misc_feature (1074)..(1074): n is a, c, g, or t
  misc_feature (1077)..(1077): n is a, c, g, or t
  misc_feature (1080)..(1080): n is a, c, g, or t
  misc_feature (1083)..(1083): n is a, c, g, or t
  misc_feature (1086)..(1086): n is a, c, g, or t
  misc_feature (1089)..(1089): n is a, c, g, or t
  misc_feature (1092)..(1092): n is a, c, g, or t
  misc_feature (1095)..(1095): n is a, c, g, or t
  misc_feature (1098)..(1098): n is a, c, g, or t
  misc_feature (1101)..(1101): n is a, c, g, or t
  misc_feature (1104)..(1104): n is a, c, g, or t
  misc_feature (1113)..(1113): n is a, c, g, or t
  misc_feature (1116)..(1116): n is a, c, g, or t
  misc_feature (1119)..(1119): n is a, c, g, or t
  misc_feature (1122)..(1122): n is a, c, g, or t
  misc_feature (1125)..(1125): n is a, c, g, or t
  misc_feature (1131)..(1131): n is a, c, g, or t
  misc_feature (1137)..(1137): n is a, c, g, or t
  misc_feature (1140)..(1140): n is a, c, g, or t
  misc_feature (1143)..(1143): n is a, c, g, or t
  misc_feature (1146)..(1146): n is a, c, g, or t
  misc_feature (1149)..(1149): n is a, c, g, or t
  misc_feature (1152)..(1152): n is a, c, g, or t
  misc_feature (1155)..(1155): n is a, c, g, or t
  misc_feature (1158)..(1158): n is a, c, g, or t
  misc_feature (1164)..(1164): n is a, c, g, or t
  misc_feature (1170)..(1170): n is a, c, g, or t
  misc_feature (1173)..(1173): n is a, c, g, or t
  misc_feature (1176)..(1176): n is a, c, g, or t
  misc_feature (1179)..(1179): n is a, c, g, or t
  misc_feature (1182)..(1182): n is a, c, g, or t
  misc_feature (1185)..(1185): n is a, c, g, or t
  misc_feature (1194)..(1194): n is a, c, g, or t
  misc_feature (1197)..(1197): n is a, c, g, or t
  misc_feature (1200)..(1200): n is a, c, g, or t
  misc_feature (1203)..(1203): n is a, c, g, or t
  misc_feature (1218)..(1218): n is a, c, g, or t
  misc_feature (1230)..(1230): n is a, c, g, or t
  misc_feature (1233)..(1233): n is a, c, g, or t
  misc_feature (1236)..(1236): n is a, c, g, or t
  misc_feature (1239)..(1239): n is a, c, g, or t
  misc_feature (1242)..(1242): n is a, c, g, or t
  misc_feature (1245)..(1245): n is a, c, g, or t
  misc_feature (1251)..(1251): n is a, c, g, or t
  misc_feature (1260)..(1260): n is a, c, g, or t
  misc_feature (1269)..(1269): n is a, c, g, or t
  misc_feature (1272)..(1272): n is a, c, g, or t
  misc_feature (1275)..(1275): n is a, c, g, or t
  misc_feature (1278)..(1278): n is a, c, g, or t
  misc_feature (1284)..(1284): n is a, c, g, or t
  misc_feature (1287)..(1287): n is a, c, g, or t
  misc_feature (1299)..(1299): n is a, c, g, or t
  misc_feature (1305)..(1305): n is a, c, g, or t
  misc_feature (1308)..(1308): n is a, c, g, or t
  misc_feature (1314)..(1314): n is a, c, g, or t
  misc_feature (1323)..(1323): n is a, c, g, or t
  misc_feature (1326)..(1326): n is a, c, g, or t
  misc_feature (1329)..(1329): n is a, c, g, or t
  misc_feature (1332)..(1332): n is a, c, g, or t
  misc_feature (1335)..(1335): n is a, c, g, or t
  misc_feature (1338)..(1338): n is a, c, g, or t
  misc_feature (1341)..(1341): n is a, c, g, or t
  misc_feature (1347)..(1347): n is a, c, g, or t
  misc_feature (1350)..(1350): n is a, c, g, or t
  misc_feature (1353)..(1353): n is a, c, g, or t
  misc_feature (1359)..(1359): n is a, c, g, or t
  misc_feature (1362)..(1362): n is a, c, g, or t
  misc_feature (1368)..(1368): n is a, c, g, or t
  misc_feature (1371)..(1371): n is a, c, g, or t
  misc_feature (1377)..(1377): n is a, c, g, or t
  misc_feature (1383)..(1383): n is a, c, g, or t
  misc_feature (1386)..(1386): n is a, c, g, or t
  misc_feature (1392)..(1392): n is a, c, g, or t
  misc_feature (1395)..(1395): n is a, c, g, or t
  misc_feature (1401)..(1401): n is a, c, g, or t
  misc_feature (1404)..(1404): n is a, c, g, or t
  misc_feature (1413)..(1413): n is a, c, g, or t
  misc_feature (1422)..(1422): n is a, c, g, or t
  misc_feature (1425)..(1425): n is a, c, g, or t
  misc_feature (1431)..(1431): n is a, c, g, or t
  misc_feature (1437)..(1437): n is a, c, g, or t
  misc_feature (1440)..(1440): n is a, c, g, or t
  misc_feature (1446)..(1446): n is a, c, g, or t
  misc_feature (1449)..(1449): n is a, c, g, or t
  misc_feature (1452)..(1452): n is a, c, g, or t
  misc_feature (1455)..(1455): n is a, c, g, or t
  misc_feature (1458)..(1458): n is a, c, g, or t
  misc_feature (1461)..(1461): n is a, c, g, or t
  misc_feature (1464)..(1464): n is a, c, g, or t
  misc_feature (1467)..(1467): n is a, c, g, or t
  misc_feature (1470)..(1470): n is a, c, g, or t
  misc_feature (1473)..(1473): n is a, c, g, or t
  misc_feature (1476)..(1476): n is a, c, g, or t
  misc_feature (1479)..(1479): n is a, c, g, or t
  misc_feature (1485)..(1485): n is a, c, g, or t
  misc_feature (1488)..(1488): n is a, c, g, or t
  misc_feature (1491)..(1491): n is a, c, g, or t
  misc_feature (1494)..(1494): n is a, c, g, or t
  misc_feature (1500)..(1500): n is a, c, g, or t
  misc_feature (1503)..(1503): n is a, c, g, or t
  misc_feature (1506)..(1506): n is a, c, g, or t
  misc_feature (1509)..(1509): n is a, c, g, or t
  misc_feature (1512)..(1512): n is a, c, g, or t
  misc_feature (1515)..(1515): n is a, c, g, or t
  misc_feature (1521)..(1521): n is a, c, g, or t
  misc_feature (1530)..(1530): n is a, c, g, or t
  misc_feature (1533)..(1533): n is a, c, g, or t
  misc_feature (1539)..(1539): n is a, c, g, or t
  misc_feature (1542)..(1542): n is a, c, g, or t
  misc_feature (1545)..(1545): n is a, c, g, or t
  misc_feature (1548)..(1548): n is a, c, g, or t
  misc_feature (1554)..(1554): n is a, c, g, or t
  misc_feature (1557)..(1557): n is a, c, g, or t
  misc_feature (1560)..(1560): n is a, c, g, or t
  misc_feature (1563)..(1563): n is a, c, g, or t
  misc_feature (1566)..(1566): n is a, c, g, or t
  misc_feature (1569)..(1569): n is a, c, g, or t
  misc_feature (1572)..(1572): n is a, c, g, or t
  misc_feature (1575)..(1575): n is a, c, g, or t
  misc_feature (1581)..(1581): n is a, c, g, or t
  misc_feature (1593)..(1593): n is a, c, g, or t
  misc_feature (1599)..(1599): n is a, c, g, or t
  misc_feature (1605)..(1605): n is a, c, g, or t
  misc_feature (1608)..(1608): n is a, c, g, or t
  misc_feature (1611)..(1611): n is a, c, g, or t
  misc_feature (1626)..(1626): n is a, c, g, or t
  misc_feature (1629)..(1629): n is a, c, g, or t
  misc_feature (1632)..(1632): n is a, c, g, or t
  misc_feature (1638)..(1638): n is a, c, g, or t
  misc_feature (1641)..(1641): n is a, c, g, or t
  misc_feature (1644)..(1644): n is a, c, g, or t
  misc_feature (1650)..(1650): n is a, c, g, or t
  misc_feature (1653)..(1653): n is a, c, g, or t
  misc_feature (1656)..(1656): n is a, c, g, or t
  misc_feature (1659)..(1659): n is a, c, g, or t
  misc_feature (1662)..(1662): n is a, c, g, or t
  misc_feature (1665)..(1665): n is a, c, g, or t
  misc_feature (1668)..(1668): n is a, c, g, or t
  misc_feature (1671)..(1671): n is a, c, g, or t
  misc_feature (1674)..(1674): n is a, c, g, or t
  misc_feature (1680)..(1680): n is a, c, g, or t
  misc_feature (1686)..(1686): n is a, c, g, or t
  misc_feature (1689)..(1689): n is a, c, g, or t
  misc_feature (1692)..(1692): n is a, c, g, or t
  misc_feature (1695)..(1695): n is a, c, g, or t
  misc_feature (1698)..(1698): n is a, c, g, or t
  misc_feature (1704)..(1704): n is a, c, g, or t
  misc_feature (1707)..(1707): n is a, c, g, or t
  misc_feature (1710)..(1710): n is a, c, g, or t
  misc_feature (1716)..(1716): n is a, c, g, or t
  misc_feature (1719)..(1719): n is a, c, g, or t
  misc_feature (1722)..(1722): n is a, c, g, or t
  misc_feature (1725)..(1725): n is a, c, g, or t
  misc_feature (1728)..(1728): n is a, c, g, or t
  misc_feature (1734)..(1734): n is a, c, g, or t
  misc_feature (1740)..(1740): n is a, c, g, or t
  misc_feature (1743)..(1743): n is a, c, g, or t
  misc_feature (1746)..(1746): n is a, c, g, or t
  misc_feature (1752)..(1752): n is a, c, g, or t
  misc_feature (1758)..(1758): n is a, c, g, or t
  misc_feature (1761)..(1761): n is a, c, g, or t
  misc_feature (1764)..(1764): n is a, c, g, or t
  misc_feature (1767)..(1767): n is a, c, g, or t
  misc_feature (1770)..(1770): n is a, c, g, or t
  misc_feature (1773)..(1773): n is a, c, g, or t
  misc_feature (1776)..(1776): n is a, c, g, or t
  misc_feature (1779)..(1779): n is a, c, g, or t
  misc_feature (1785)..(1785): n is a, c, g, or t
  misc_feature (1788)..(1788): n is a, c, g, or t
  misc_feature (1794)..(1794): n is a, c, g, or t
  misc_feature (1797)..(1797): n is a, c, g, or t
  misc_feature (1803)..(1803): n is a, c, g, or t
  misc_feature (1806)..(1806): n is a, c, g, or t
  misc_feature (1809)..(1809): n is a, c, g, or t
  misc_feature (1812)..(1812): n is a, c, g, or t
  misc_feature (1815)..(1815): n is a, c, g, or t
  misc_feature (1818)..(1818): n is a, c, g, or t
  misc_feature (1821)..(1821): n is a, c, g, or t
  misc_feature (1824)..(1824): n is a, c, g, or t
  misc_feature (1827)..(1827): n is a, c, g, or t
  misc_feature (1830)..(1830): n is a, c, g, or t
  misc_feature (1833)..(1833): n is a, c, g, or t
  misc_feature (1839)..(1839): n is a, c, g, or t
  misc_feature (1842)..(1842): n is a, c, g, or t
  misc_feature (1848)..(1848): n is a, c, g, or t
  misc_feature (1851)..(1851): n is a, c, g, or t
  misc_feature (1854)..(1854): n is a, c, g, or t
  misc_feature (1857)..(1857): n is a, c, g, or t
  misc_feature (1860)..(1860): n is a, c, g, or t
  misc_feature (1869)..(1869): n is a, c, g, or t
  misc_feature (1875)..(1875): n is a, c, g, or t
  misc_feature (1878)..(1878): n is a, c, g, or t
  misc_feature (1881)..(1881): n is a, c, g, or t
  misc_feature (1887)..(1887): n is a, c, g, or t
  misc_feature (1890)..(1890): n is a, c, g, or t
  misc_feature (1893)..(1893): n is a, c, g, or t
  misc_feature (1896)..(1896): n is a, c, g, or t
  misc_feature (1902)..(1902): n is a, c, g, or t
  misc_feature (1905)..(1905): n is a, c, g, or t
  misc_feature (1914)..(1914): n is a, c, g, or t
  misc_feature (1923)..(1923): n is a, c, g, or t
  misc_feature (1929)..(1929): n is a, c, g, or t
  misc_feature (1932)..(1932): n is a, c, g, or t
  misc_feature (1935)..(1935): n is a, c, g, or t
  misc_feature (1941)..(1941): n is a, c, g, or t
  misc_feature (1950)..(1950): n is a, c, g, or t
  misc_feature (1956)..(1956): n is a, c, g, or t
  misc_feature (1959)..(1959): n is a, c, g, or t
  misc_feature (1965)..(1965): n is a, c, g, or t
  misc_feature (1968)..(1968): n is a, c, g, or t
  misc_feature (1971)..(1971): n is a, c, g, or t
  misc_feature (1977)..(1977): n is a, c, g, or t
  misc_feature (1983)..(1983): n is a, c, g, or t
  misc_feature (1986)..(1986): n is a, c, g, or t
  misc_feature (1995)..(1995): n is a, c, g, or t
  misc_feature (2001)..(2001): n is a, c, g, or t
  misc_feature (2004)..(2004): n is a, c, g, or t
  misc_feature (2010)..(2010): n is a, c, g, or t
  misc_feature (2013)..(2013): n is a, c, g, or t
  misc_feature (2016)..(2016): n is a, c, g, or t
  misc_feature (2022)..(2022): n is a, c, g, or t
  misc_feature (2028)..(2028): n is a, c, g, or t
  misc_feature (2031)..(2031): n is a, c, g, or t
  misc_feature (2037)..(2037): n is a, c, g, or t
  misc_feature (2040)..(2040): n is a, c, g, or t
  misc_feature (2043)..(2043): n is a, c, g, or t
  misc_feature (2046)..(2046): n is a, c, g, or t
  misc_feature (2049)..(2049): n is a, c, g, or t
  misc_feature (2058)..(2058): n is a, c, g, or t
  misc_feature (2061)..(2061): n is a, c, g, or t
  misc_feature (2067)..(2067): n is a, c, g, or t
  misc_feature (2070)..(2070): n is a, c, g, or t
  misc_feature (2076)..(2076): n is a, c, g, or t
  misc_feature (2079)..(2079): n is a, c, g, or t
  misc_feature (2082)..(2082): n is a, c, g, or t
  misc_feature (2085)..(2085): n is a, c, g, or t
  misc_feature (2094)..(2094): n is a, c, g, or t
  misc_feature (2097)..(2097): n is a, c, g, or t
  misc_feature (2103)..(2103): n is a, c, g, or t
  misc_feature (2106)..(2106): n is a, c, g, or t
  misc_feature (2109)..(2109): n is a, c, g, or t
  misc_feature (2112)..(2112): n is a, c, g, or t
  misc_feature (2121)..(2121): n is a, c, g, or t
  misc_feature (2124)..(2124): n is a, c, g, or t
  misc_feature (2127)..(2127): n is a, c, g, or t
  misc_feature (2130)..(2130): n is a, c, g, or t
  misc_feature (2133)..(2133): n is a, c, g, or t
  misc_feature (2136)..(2136): n is a, c, g, or t
  misc_feature (2139)..(2139): n is a, c, g, or t
  misc_feature (2145)..(2145): n is a, c, g, or t
  misc_feature (2148)..(2148): n is a, c, g, or t
  misc_feature (2154)..(2154): n is a, c, g, or t
  misc_feature (2157)..(2157): n is a, c, g, or t
  misc_feature (2163)..(2163): n is a, c, g, or t
  misc_feature (2166)..(2166): n is a, c, g, or t
  misc_feature (2169)..(2169): n is a, c, g, or t
  misc_feature (2205)..(2205): n is a, c, g, or t
  misc_feature (2208)..(2208): n is a, c, g, or t
  misc_feature (2211)..(2211): n is a, c, g, or t
  misc_feature (2226)..(2226): n is a, c, g, or t
  misc_feature (2232)..(2232): n is a, c, g, or t
  misc_feature (2235)..(2235): n is a, c, g, or t
  misc_feature (2241)..(2241): n is a, c, g, or t
  misc_feature (2244)..(2244): n is a, c, g, or t
  misc_feature (2250)..(2250): n is a, c, g, or t
  misc_feature (2256)..(2256): n is a, c, g, or t
  misc_feature (2259)..(2259): n is a, c, g, or t
  misc_feature (2262)..(2262): n is a, c, g, or t
  misc_feature (2265)..(2265): n is a, c, g, or t
  misc_feature (2271)..(2271): n is a, c, g, or t
  misc_feature (2274)..(2274): n is a, c, g, or t
  misc_feature (2277)..(2277): n is a, c, g, or t
  misc_feature (2283)..(2283): n is a, c, g, or t
  misc_feature (2289)..(2289): n is a, c, g, or t
  misc_feature (2292)..(2292): n is a, c, g, or t
  misc_feature (2295)..(2295): n is a, c, g, or t
  misc_feature (2298)..(2298): n is a, c, g, or t
  misc_feature (2301)..(2301): n is a, c, g, or t
  misc_feature (2304)..(2304): n is a, c, g, or t
  misc_feature (2307)..(2307): n is a, c, g, or t
  misc_feature (2316)..(2316): n is a, c, g, or t
  misc_feature (2319)..(2319): n is a, c, g, or t
  misc_feature (2322)..(2322): n is a, c, g, or t
  misc_feature (2325)..(2325): n is a, c, g, or t
  misc_feature (2328)..(2328): n is a, c, g, or t
  misc_feature (2331)..(2331): n is a, c, g, or t
  misc_feature (2334)..(2334): n is a, c, g, or t
  misc_feature (2340)..(2340): n is a, c, g, or t
  misc_feature (2343)..(2343): n is a, c, g, or t
  misc_feature (2346)..(2346): n is a, c, g, or t
  misc_feature (2352)..(2352): n is a, c, g, or t
  misc_feature (2358)..(2358): n is a, c, g, or t
  misc_feature (2361)..(2361): n is a, c, g, or t
  misc_feature (2370)..(2370): n is a, c, g, or t
  misc_feature (2376)..(2376): n is a, c, g, or t
  misc_feature (2379)..(2379): n is a, c, g, or t
  misc_feature (2385)..(2385): n is a, c, g, or t
  misc_feature (2388)..(2388): n is a, c, g, or t
  misc_feature (2394)..(2394): n is a, c, g, or t
  misc_feature (2397)..(2397): n is a, c, g, or t
  misc_feature (2400)..(2400): n is a, c, g, or t
  misc_feature (2403)..(2403): n is a, c, g, or t
  misc_feature (2406)..(2406): n is a, c, g, or t
  misc_feature (2409)..(2409): n is a, c, g, or t
  misc_feature (2412)..(2412): n is a, c, g, or t
  misc_feature (2415)..(2415): n is a, c, g, or t
  misc_feature (2418)..(2418): n is a, c, g, or t
  misc_feature (2421)..(2421): n is a, c, g, or t
  misc_feature (2424)..(2424): n is a, c, g, or t
  misc_feature (2427)..(2427): n is a, c, g, or t
  misc_feature (2430)..(2430): n is a, c, g, or t
  misc_feature (2433)..(2433): n is a, c, g, or t
  misc_feature (2436)..(2436): n is a, c, g, or t
  misc_feature (2439)..(2439): n is a, c, g, or t
  misc_feature (2442)..(2442): n is a, c, g, or t
  misc_feature (2445)..(2445): n is a, c, g, or t
  misc_feature (2448)..(2448): n is a, c, g, or t
  misc_feature (2451)..(2451): n is a, c, g, or t
  misc_feature (2454)..(2454): n is a, c, g, or t
  misc_feature (2457)..(2457): n is a, c, g, or t
  misc_feature (2460)..(2460): n is a, c, g, or t
ggngargcnggnytnccnggngcnccnggnwsnccnggncaraarggncayaarggngarccnggngaraayggnytncayggngcnccnggnttyccnggncaraarggngarcarggnttygarggnwsnaarggngaracnggngaraarggngarcarggngaraarggngayccngcnytngcnggnytnaayggngaraayggnytnaarggngayytnggnccncayggnccnccnggnccnaarggngaraarggngayacnggnccnccnggnccnccngcnytnccnggnwsnytnggnathcarggnccncarggnccnccnggnaargarggncarmgnggnmgnmgnggnaaracnggnccnccnggnaarccnggnccnccnggnccnccnggnccnccnggnathcarggnathcaycaracnytnggnggntaytayaayaargayaayaarggnaaygaygarcaygargcnggnggnytnaarggngayaarggngaracnggnytnccnggnttyccnggnwsngtnggnccnaarggncaraarggngarccnggngarccnttyacnaarggngaraarggngaymgnggngarccnggngtnathggnwsncarggngtnaarggngarccnggngayccnggnccnccnggnytnathggnwsnccnggnytnaarggncarcarggnwsngcnggnwsnatgggnccnmgnggnccnccnggngaygtnggnytnccnggngarcayggnathccnggnaarcarggnathaarggngaraarggngayccnggnggnathathggnccnccnggnytnccnggnccnaarggngargcnggnccnccnggnaarwsnytnccnggngarccnggnytngayggnaayccnggngcnccnggnccnmgnggnccnaarggngarmgnggnytnccnggngtncayggnwsnccnggngayathggnccncarggnathggnathccnggnmgnacnggngcncarggnccngcnggngarccnggnathcarggnccnmgnggnytnccnggnytnccnggnacnccnggnacnccnggnaaygayggngtnccnggnmgngayggnaarccnggnytnccnggnccnccnggngayccnathgcnytnccnytnytnggngayathggngcnytnytnaaraayttytgyggnaaytgycargcnwsngtnccnggnytnaarwsnaayaarggngargarggnggngcnggngarccnggnaartaygaywsnatggcnmgnaarggngayathggnccnmgnggnccnccnggnathccnggnmgngarggnccnaarggnwsnaarggngarmgnggntayccnggnathccnggngaraarggngaygarggnytncarggnathccnggnathccnggngcnccnggnccnacnggnccnccnggnytnatgggnmgnacnggncayccnggnccnacnggngcnaarggngaraarggnwsngayggnccnccnggnaarccnggnccnccnggnccnccnggnathccnttyaaygarmgnaayggnatgwsnwsnytntayaarathaarggnggngtnaaygtnccnwsntayccnggnccnccnggnccnccnggnccnaarggngayccnggnccngtnggngarccnggngcnatgggnytnccnggnytngarggnttyccnggngtnaarggngaymgnggnccngcnggnccnccnggnathgcnggnatgwsnggnaarccnggngcnccnggnccnccnggngtnccnggngarccnggngarmgnggnccngtnggngayathggnttyccnggnccngarggnccnwsnggnaarccnggnathaayggnaargayggnathccnggngcncarggnathatgggnaarccnggngaymgnggnccnaarggngarmgnggngaycarggnathccnggngaymgnggnwsncarggngarmgnggnaarccnggnytnacnggnatgaarggngcnathggnccnatgggnccnccnggnaayaarggnwsnatgggnwsnccnggncaycarggnccnccnggnwsnccnggnathccnggnathccngcngaygcngtnwsnttygargarathaaraartayathaaycargargtnytnmgnathttygargarmgnatggcngtnttyytnwsncarytnaarytnccngcngcnatgytngcngcncargcntayggnmgnccnggnccnccnggnaargayggnytnccnggnccnccnggngayccnggnccncarggntaymgnggncaraarggngarmgnggngarccnggnathggnytnccnggnwsnccnggnytnccnggnacnwsngcnytnggnytnccnggnwsnccnggngcnccn

SEQ ID NO: 1135 - DNA, 360 bp, Artificial Sequence
  hCol-CNA40 (alpha1(XX) THD)
  misc_feature (3)..(3): n is a, c, g, or t
  misc_feature (6)..(6): n is a, c, g, or t
  misc_feature (9)..(9): n is a, c, g, or t
  misc_feature (12)..(12): n is a, c, g, or t
  misc_feature (15)..(15): n is a, c, g, or t
  misc_feature (21)..(21): n is a, c, g, or t
  misc_feature (24)..(24): n is a, c, g, or t
  misc_feature (27)..(27): n is a, c, g, or t
  misc_feature (30)..(30): n is a, c, g, or t
  misc_feature (33)..(33): n is a, c, g, or t
  misc_feature (36)..(36): n is a, c, g, or t
  misc_feature (39)..(39): n is a, c, g, or t
  misc_feature (42)..(42): n is a, c, g, or t
  misc_feature (48)..(48): n is a, c, g, or t
  misc_feature (51)..(51): n is a, c, g, or t
  misc_feature (54)..(54): n is a, c, g, or t
  misc_feature (57)..(57): n is a, c, g, or t
  misc_feature (66)..(66): n is a, c, g, or t
  misc_feature (72)..(72): n is a, c, g, or t
  misc_feature (75)..(75): n is a, c, g, or t
  misc_feature (78)..(78): n is a, c, g, or t
  misc_feature (81)..(81): n is a, c, g, or t
  misc_feature (84)..(84): n is a, c, g, or t
  misc_feature (87)..(87): n is a, c, g, or t
  misc_feature (90)..(90): n is a, c, g, or t
  misc_feature (93)..(93): n is a, c, g, or t
  misc_feature (96)..(96): n is a, c, g, or t
  misc_feature (102)..(102): n is a, c, g, or t
  misc_feature (111)..(111): n is a, c, g, or t
  misc_feature (120)..(120): n is a, c, g, or t
  misc_feature (123)..(123): n is a, c, g, or t
  misc_feature (126)..(126): n is a, c, g, or t
  misc_feature (129)..(129): n is a, c, g, or t
  misc_feature (132)..(132): n is a, c, g, or t
  misc_feature (138)..(138): n is a, c, g, or t
  misc_feature (144)..(144): n is a, c, g, or t
  misc_feature (147)..(147): n is a, c, g, or t
  misc_feature (156)..(156): n is a, c, g, or t
  misc_feature (162)..(162): n is a, c, g, or t
  misc_feature (165)..(165): n is a, c, g, or t
  misc_feature (168)..(168): n is a, c, g, or t
  misc_feature (171)..(171): n is a, c, g, or t
  misc_feature (174)..(174): n is a, c, g, or t
  misc_feature (177)..(177): n is a, c, g, or t
  misc_feature (183)..(183): n is a, c, g, or t
  misc_feature (186)..(186): n is a, c, g, or t
  misc_feature (192)..(192): n is a, c, g, or t
  misc_feature (198)..(198): n is a, c, g, or t
  misc_feature (201)..(201): n is a, c, g, or t
  misc_feature (204)..(204): n is a, c, g, or t
  misc_feature (210)..(210): n is a, c, g, or t
  misc_feature (213)..(213): n is a, c, g, or t
  misc_feature (216)..(216): n is a, c, g, or t
  misc_feature (219)..(219): n is a, c, g, or t
  misc_feature (222)..(222): n is a, c, g, or t
  misc_feature (225)..(225): n is a, c, g, or t
  misc_feature (228)..(228): n is a, c, g, or t
  misc_feature (231)..(231): n is a, c, g, or t
  misc_feature (234)..(234): n is a, c, g, or t
  misc_feature (237)..(237): n is a, c, g, or t
  misc_feature (240)..(240): n is a, c, g, or t
  misc_feature (243)..(243): n is a, c, g, or t
  misc_feature (246)..(246): n is a, c, g, or t
  misc_feature (255)..(255): n is a, c, g, or t
  misc_feature (261)..(261): n is a, c, g, or t
  misc_feature (264)..(264): n is a, c, g, or t
  misc_feature (267)..(267): n is a, c, g, or t
  misc_feature (270)..(270): n is a, c, g, or t
  misc_feature (273)..(273): n is a, c, g, or t
  misc_feature (276)..(276): n is a, c, g, or t
  misc_feature (279)..(279): n is a, c, g, or t
  misc_feature (282)..(282): n is a, c, g, or t
  misc_feature (288)..(288): n is a, c, g, or t
  misc_feature (291)..(291): n is a, c, g, or t
  misc_feature (294)..(294): n is a, c, g, or t
  misc_feature (297)..(297): n is a, c, g, or t
  misc_feature (300)..(300): n is a, c, g, or t
  misc_feature (303)..(303): n is a, c, g, or t
  misc_feature (306)..(306): n is a, c, g, or t
  misc_feature (309)..(309): n is a, c, g, or t
  misc_feature (312)..(312): n is a, c, g, or t
  misc_feature (315)..(315): n is a, c, g, or t
  misc_feature (318)..(318): n is a, c, g, or t
  misc_feature (321)..(321): n is a, c, g, or t
  misc_feature (324)..(324): n is a, c, g, or t
  misc_feature (327)..(327): n is a, c, g, or t
  misc_feature (330)..(330): n is a, c, g, or t
  misc_feature (336)..(336): n is a, c, g, or t
  misc_feature (342)..(342): n is a, c, g, or t
  misc_feature (345)..(345): n is a, c, g, or t
  misc_feature (354)..(354): n is a, c, g, or t
  misc_feature (360)..(360): n is a, c, g, or t
ggnccnccnggnccncarggnccnccnggnytnccnggnmgnaayggnacnccnggngarcarggnttyccnggnccnmgnggnccnccnggngtnaarggngaraarggngaycayggnytnccnggnytncarggncayccnggncaycarggnathccnggnmgngtnggnytncarggnccnaarggnatgmgnggnytngarggnacngcnggnytnccnggnccnccnggnccnmgnggnttycarggnatggcnggngcnmgnggnacnwsnggngarmgnggnccnccnggnacngtnggnccnacnggnytnccnggnccnaarggngarmgnggngaraarggngarccn

SEQ ID NO: 1136 - DNA, 1302 bp, Artificial Sequence
  hCol-CNA41 (alpha1(XXI) THD)
  misc_feature (3)..(3): n is a, c, g, or t
  misc_feature (9)..(9): n is a, c, g, or t
  misc_feature (12)..(12): n is a, c, g, or t
  misc_feature (15)..(15): n is a, c, g, or t
  misc_feature (21)..(21): n is a, c, g, or t
  misc_feature (24)..(24): n is a, c, g, or t
  misc_feature (30)..(30): n is a, c, g, or t
  misc_feature (36)..(36): n is a, c, g, or t
  misc_feature (39)..(39): n is a, c, g, or t
  misc_feature (42)..(42): n is a, c, g, or t
  misc_feature (45)..(45): n is a, c, g, or t
  misc_feature (48)..(48): n is a, c, g, or t
  misc_feature (54)..(54): n is a, c, g, or t
  misc_feature (57)..(57): n is a, c, g, or t
  misc_feature (63)..(63): n is a, c, g, or t
  misc_feature (66)..(66): n is a, c, g, or t
  misc_feature (72)..(72): n is a, c, g, or t
  misc_feature (75)..(75): n is a, c, g, or t
  misc_feature (84)..(84): n is a, c, g, or t
  misc_feature (90)..(90): n is a, c, g, or t
  misc_feature (93)..(93): n is a, c, g, or t
  misc_feature (102)..(102): n is a, c, g, or t
  misc_feature (108)..(108): n is a, c, g, or t
  misc_feature (111)..(111): n is a, c, g, or t
  misc_feature (114)..(114): n is a, c, g, or t
  misc_feature (117)..(117): n is a, c, g, or t
  misc_feature (120)..(120): n is a, c, g, or t
  misc_feature (123)..(123): n is a, c, g, or t
  misc_feature (126)..(126): n is a, c, g, or t
  misc_feature (129)..(129): n is a, c, g, or t
  misc_feature (132)..(132): n is a, c, g, or t
  misc_feature (135)..(135): n is a, c, g, or t
  misc_feature (138)..(138): n is a, c, g, or t
  misc_feature (147)..(147): n is a, c, g, or t
  misc_feature (150)..(150): n is a, c, g, or t
  misc_feature (153)..(153): n is a, c, g, or t
  misc_feature (156)..(156): n is a, c, g, or t
  misc_feature (159)..(159): n is a, c, g, or t
  misc_feature (162)..(162): n is a, c, g, or t
  misc_feature (165)..(165): n is a, c, g, or t
  misc_feature (174)..(174): n is a, c, g, or t
  misc_feature (180)..(180): n is a, c, g, or t
  misc_feature (183)..(183): n is a, c, g, or t
  misc_feature (186)..(186): n is a, c, g, or t
  misc_feature (192)..(192): n is a, c, g, or t
  misc_feature (201)..(201): n is a, c, g, or t
  misc_feature (207)..(207): n is a, c, g, or t
  misc_feature (210)..(210): n is a, c, g, or t
  misc_feature (213)..(213): n is a, c, g, or t
  misc_feature (216)..(216): n is a, c, g, or t
  misc_feature (219)..(219): n is a, c, g, or t
  misc_feature (225)..(225): n is a, c, g, or t
  misc_feature (228)..(228): n is a, c, g, or t
  misc_feature (231)..(231): n is a, c, g, or t
  misc_feature (237)..(237): n is a, c, g, or t
  misc_feature (243)..(243): n is a, c, g, or t
  misc_feature (246)..(246): n is a, c, g, or t
  misc_feature (249)..(249): n is a, c, g, or t
  misc_feature (255)..(255): n is a, c, g, or t
  misc_feature (264)..(264): n is a, c, g, or t
  misc_feature (267)..(267): n is a, c, g, or t
  misc_feature (273)..(273): n is a, c, g, or t
  misc_feature (282)..(282): n is a, c, g, or t
  misc_feature (285)..(285): n is a, c, g, or t
  misc_feature (288)..(288): n is a, c, g, or t
  misc_feature (291)..(291): n is a, c, g, or t
  misc_feature (300)..(300): n is a, c, g, or t
  misc_feature (309)..(309): n is a, c, g, or t
  misc_feature (312)..(312): n is a, c, g, or t
  misc_feature (318)..(318): n is a, c, g, or t
  misc_feature (327)..(327): n is a, c, g, or t
  misc_feature (333)..(333): n is a, c, g, or t
  misc_feature (336)..(336): n is a, c, g, or t
  misc_feature (342)..(342): n is a, c, g, or t
  misc_feature (345)..(345): n is a, c, g, or t
  misc_feature (348)..(348): n is a, c, g, or t
  misc_feature (351)..(351): n is a, c, g, or t
  misc_feature (354)..(354): n is a, c, g, or t
  misc_feature (357)..(357): n is a, c, g, or t
  misc_feature (360)..(360): n is a, c, g, or t
  misc_feature (363)..(363): n is a, c, g, or t
  misc_feature (369)..(369): n is a, c, g, or t
  misc_feature (372)..(372): n is a, c, g, or t
  misc_feature (375)..(375): n is a, c, g, or t
  misc_feature (381)..(381): n is a, c, g, or t
  misc_feature (390)..(390): n is a, c, g, or t
  misc_feature (393)..(393): n is a, c, g, or t
  misc_feature (399)..(399): n is a, c, g, or t
  misc_feature (402)..(402): n is a, c, g, or t
  misc_feature (405)..(405): n is a, c, g, or t
  misc_feature (408)..(408): n is a, c, g, or t
  misc_feature (417)..(417): n is a, c, g, or t
  misc_feature (423)..(423): n is a, c, g, or t
  misc_feature (426)..(426): n is a, c, g, or t
  misc_feature (429)..(429): n is a, c, g, or t
  misc_feature (432)..(432): n is a, c, g, or t
  misc_feature (435)..(435): n is a, c, g, or t
  misc_feature (438)..(438): n is a, c, g, or t
  misc_feature (441)..(441): n is a, c, g, or t
  misc_feature (444)..(444): n is a, c, g, or t
  misc_feature (453)..(453): n is a, c, g, or t
  misc_feature (456)..(456): n is a, c, g, or t
  misc_feature (459)..(459): n is a, c, g, or t
  misc_feature (462)..(462): n is a, c, g, or t
  misc_feature (468)..(468): n is a, c, g, or t
  misc_feature (471)..(471): n is a, c, g, or t
  misc_feature (477)..(477): n is a, c, g, or t
  misc_feature (480)..(480): n is a, c, g, or t
  misc_feature (486)..(486): n is a, c, g, or t
  misc_feature (489)..(489): n is a, c, g, or t
  misc_feature (495)..(495): n is a, c, g, or t
  misc_feature (498)..(498): n is a, c, g, or t
  misc_feature (501)..(501): n is a, c, g, or t
  misc_feature (507)..(507): n is a, c, g, or t
  misc_feature (516)..(516): n is a, c, g, or t
  misc_feature (525)..(525): n is a, c, g, or t
  misc_feature (528)..(528): n is a, c, g, or t
  misc_feature (531)..(531): n is a, c, g, or t
  misc_feature (534)..(534): n is a, c, g, or t
  misc_feature (543)..(543): n is a, c, g, or t
  misc_feature (552)..(552): n is a, c, g, or t
  misc_feature (555)..(555): n is a, c, g, or t
  misc_feature (558)..(558): n is a, c, g, or t
  misc_feature (561)..(561): n is a, c, g, or t
  misc_feature (567)..(567): n is a, c, g, or t
  misc_feature (570)..(570): n is a, c, g, or t
  misc_feature (573)..(573): n is a, c, g, or t
  misc_feature (579)..(579): n is a, c, g, or t
  misc_feature (582)..(582): n is a, c, g, or t
  misc_feature (588)..(588): n is a, c, g, or t
  misc_feature (591)..(591): n is a, c, g, or t
  misc_feature (594)..(594): n is a, c, g, or t
  misc_feature (597)..(597): n is a, c, g, or t
  misc_feature (603)..(603): n is a, c, g, or t
  misc_feature (606)..(606): n is a, c, g, or t
  misc_feature (609)..(609): n is a, c, g, or t
  misc_feature (612)..(612): n is a, c, g, or t
  misc_feature (615)..(615): n is a, c, g, or t
  misc_feature (618)..(618): n is a, c, g, or t
  misc_feature (624)..(624): n is a, c, g, or t
  misc_feature (627)..(627): n is a, c, g, or t
  misc_feature (633)..(633): n is a, c, g, or t
  misc_feature (639)..(639): n is a, c, g, or t
  misc_feature (642)..(642): n is a, c, g, or t
  misc_feature (651)..(651): n is a, c, g, or t
  misc_feature (657)..(657): n is a, c, g, or t
  misc_feature (660)..(660): n is a, c, g, or t
  misc_feature (663)..(663): n is a, c, g, or t
  misc_feature (666)..(666): n is a, c, g, or t
  misc_feature (669)..(669): n is a, c, g, or t
  misc_feature (672)..(672): n is a, c, g, or t
  misc_feature (678)..(678): n is a, c, g, or t
  misc_feature (684)..(684): n is a, c, g, or t
  misc_feature (687)..(687): n is a, c, g, or t
  misc_feature (690)..(690): n is a, c, g, or t
  misc_feature (693)..(693): n is a, c, g, or t
  misc_feature (696)..(696): n is a, c, g, or t
  misc_feature (699)..(699): n is a, c, g, or t
  misc_feature (702)..(702): n is a, c, g, or t
  misc_feature (705)..(705): n is a, c, g, or t
  misc_feature (711)..(711): n is a, c, g, or t
  misc_feature (714)..(714): n is a, c, g, or t
  misc_feature (723)..(723): n is a, c, g, or t
  misc_feature (726)..(726): n is a, c, g, or t
  misc_feature (729)..(729): n is a, c, g, or t
  misc_feature (732)..(732): n is a, c, g, or t
  misc_feature (741)..(741): n is a, c, g, or t
  misc_feature (750)..(750): n is a, c, g, or t
  misc_feature (759)..(759): n is a, c, g, or t
  misc_feature (768)..(768): n is a, c, g, or t
  misc_feature (777)..(777): n is a, c, g, or t
  misc_feature (786)..(786): n is a, c, g, or t
  misc_feature (795)..(795): n is a, c, g, or t
  misc_feature (804)..(804): n is a, c, g, or t
  misc_feature (807)..(807): n is a, c, g, or t
  misc_feature (813)..(813): n is a, c, g, or t
  misc_feature (819)..(819): n is a, c, g, or t
  misc_feature (822)..(822): n is a, c, g, or t
  misc_feature (831)..(831): n is a, c, g, or t
  misc_feature (840)..(840): n is a, c, g, or t
  misc_feature (849)..(849): n is a, c, g, or t
  misc_feature (852)..(852): n is a, c, g, or t
  misc_feature (858)..(858): n is a, c, g, or t
  misc_feature (864)..(864): n is a, c, g, or t
  misc_feature (867)..(867): n is a, c, g, or t
  misc_feature (876)..(876): n is a, c, g, or t
  misc_feature (882)..(882): n is a, c, g, or t
  misc_feature (885)..(885): n is a, c, g, or t
  misc_feature (888)..(888): n is a, c, g, or t
  misc_feature (891)..(891): n is a, c, g, or t
  misc_feature (894)..(894): n is a, c, g, or t
  misc_feature (897)..(897): n is a, c, g, or t
  misc_feature (903)..(903): n is a, c, g, or t
  misc_feature (906)..(906): n is a, c, g, or t
  misc_feature (912)..(912): n is a, c, g, or t
  misc_feature (918)..(918): n is a, c, g, or t
  misc_feature (921)..(921): n is a, c, g, or t
  misc_feature (924)..(924): n is a, c, g, or t
  misc_feature (930)..(930): n is a, c, g, or t
  misc_feature (933)..(933): n is a, c, g, or t
  misc_feature (939)..(939): n is a, c, g, or t
  misc_feature (942)..(942): n is a, c, g, or t
  misc_feature (945)..(945): n is a, c, g, or t
  misc_feature (948)..(948): n is a, c, g, or t
  misc_feature (951)..(951): n is a, c, g, or t
  misc_feature (957)..(957): n is a, c, g, or t
  misc_feature (963)..(963): n is a, c, g, or t
  misc_feature (966)..(966): n is a, c, g, or t
  misc_feature (972)..(972): n is a, c, g, or t
  misc_feature (975)..(975): n is a, c, g, or t
  misc_feature (978)..(978): n is a, c, g, or t
  misc_feature (984)..(984): n is a, c, g, or t
  misc_feature (987)..(987): n is a, c, g, or t
  misc_feature (990)..(990): n is a, c, g, or t
  misc_feature (993)..(993): n is a, c, g, or t
  misc_feature (996)..(996): n is a, c, g, or t
  misc_feature (1002)..(1002): n is a, c, g, or t
  misc_feature (1008)..(1008): n is a, c, g, or t
  misc_feature (1011)..(1011): n is a, c, g, or t
  misc_feature (1014)..(1014): n is a, c, g, or t
  misc_feature (1023)..(1023): n is a, c, g, or t
  misc_feature (1038)..(1038): n is a, c, g, or t
  misc_feature (1044)..(1044): n is a, c, g, or t
  misc_feature (1050)..(1050): n is a, c, g, or t
  misc_feature (1056)..(1056): n is a, c, g, or t
  misc_feature (1062)..(1062): n is a, c, g, or t
  misc_feature (1065)..(1065): n is a, c, g, or t
  misc_feature (1071)..(1071): n is a, c, g, or t
  misc_feature (1074)..(1074): n is a, c, g, or t
  misc_feature (1077)..(1077): n is a, c, g, or t
  misc_feature (1080)..(1080): n is a, c, g, or t
  misc_feature (1083)..(1083): n is a, c, g, or t
  misc_feature (1089)..(1089): n is a, c, g, or t
  misc_feature (1092)..(1092): n is a, c, g, or t
  misc_feature (1095)..(1095): n is a, c, g, or t
  misc_feature (1101)..(1101): n is a, c, g, or t
  misc_feature (1119)..(1119): n is a, c, g, or t
  misc_feature (1122)..(1122): n is a, c, g, or t
  misc_feature (1131)..(1131): n is a, c, g, or t
  misc_feature (1134)..(1134): n is a, c, g, or t
  misc_feature (1137)..(1137): n is a, c, g, or t
  misc_feature (1140)..(1140): n is a, c, g, or t
  misc_feature (1146)..(1146): n is a, c, g, or t
  misc_feature (1149)..(1149): n is a, c, g, or t
  misc_feature (1152)..(1152): n is a, c, g, or t
  misc_feature (1155)..(1155): n is a, c, g, or t
  misc_feature (1158)..(1158): n is a, c, g, or t
  misc_feature (1161)..(1161): n is a, c, g, or t
  misc_feature (1167)..(1167): n is a, c, g, or t
  misc_feature (1170)..(1170): n is a, c, g, or t
  misc_feature (1176)..(1176): n is a, c, g, or t
  misc_feature (1179)..(1179): n is a, c, g, or t
  misc_feature (1182)..(1182): n is a, c, g, or t
  misc_feature (1185)..(1185): n is a, c, g, or t
  misc_feature (1188)..(1188): n is a, c, g, or t
  misc_feature (1191)..(1191): n is a, c, g, or t
  misc_feature (1194)..(1194): n is a, c, g, or t
  misc_feature (1197)..(1197): n is a, c, g, or t
  misc_feature (1200)..(1200): n is a, c, g, or t
  misc_feature (1203)..(1203): n is a, c, g, or t
  misc_feature (1206)..(1206): n is a, c, g, or t
  misc_feature (1212)..(1212): n is a, c, g, or t
  misc_feature (1215)..(1215): n is a, c, g, or t
  misc_feature (1218)..(1218): n is a, c, g, or t
  misc_feature (1221)..(1221): n is a, c, g, or t
  misc_feature (1224)..(1224): n is a, c, g, or t
  misc_feature (1227)..(1227): n is a, c, g, or t
  misc_feature (1230)..(1230): n is a, c, g, or t
  misc_feature (1233)..(1233): n is a, c, g, or t
  misc_feature (1236)..(1236): n is a, c, g, or t
  misc_feature (1239)..(1239): n is a, c, g, or t
  misc_feature (1242)..(1242): n is a, c, g, or t
  misc_feature (1245)..(1245): n is a, c, g, or t
  misc_feature (1248)..(1248): n is a, c, g, or t
  misc_feature (1251)..(1251): n is a, c, g, or t
  misc_feature (1254)..(1254): n is a, c, g, or t
  misc_feature (1257)..(1257): n is a, c, g, or t
  misc_feature (1260)..(1260): n is a, c, g, or t
  misc_feature (1266)..(1266): n is a, c, g, or t
  misc_feature (1269)..(1269): n is a, c, g, or t
  misc_feature (1272)..(1272): n is a, c, g, or t
  misc_feature (1275)..(1275): n is a, c, g, or t
  misc_feature (1278)..(1278): n is a, c, g, or t
  misc_feature (1284)..(1284): n is a, c, g, or t
  misc_feature (1293)..(1293): n is a, c, g, or t
  misc_feature (1296)..(1296): n is a, c, g, or t
  misc_feature (1302)..(1302): n is a, c, g, or t
ggnaarccnggnytncarggnccnaarggngayccnggnytnccnggnaayccnggntayccnggncarccnggncargayggnaarccnggntaycarggnathgcnggnacnccnggngtnccnggnwsnccnggnathcarggngcnmgnggnytnccnggntayaarggngarccnggnmgngayggngayaarggngaymgnggnytnccnggnttyccnggnytncayggnatgccnggnwsnaarggngaratgggngcnaarggngayaarggnwsnccnggnttytayggnaaraarggngcnaarggngaraarggnaaygcnggnttyccnggnytnccnggnccngcnggngarccnggnmgncayggnaargayggnytnatgggnwsnccnggnttyaarggngargcnggnwsnccnggngcnccnggncargayggnacnmgnggngarccnggnathccnggnttyccnggnaaymgnggnytnatgggncaraarggngarathggnccnccnggncarcarggnaaraarggngcnccnggnatgccnggnytnatgggnwsnaayggnwsnccnggncarccnggnacnccnggnwsnaarggnwsnaarggngarccnggnathcarggnatgccnggngcnwsnggnytnaarggngarccnggngcnacnggnwsnccnggngarccnggntayatgggnytnccnggnathcarggnaaraarggngayaarggnaaycarggngaraarggnathcarggncaraarggngaraayggnmgncarggnathccnggncarcarggnathcarggncaycayggngcnaarggngarmgnggngaraarggngarccnggngtnmgnggngcnathggnwsnaarggngarwsnggngtngayggnytnatgggnccngcnggnccnaarggncarccnggngayccnggnccncarggnccnccnggnytngayggnaarccnggnmgngarttywsngarcarttyathmgncargtntgyacngaygtnathmgngcncarytnccngtnytnytncarwsnggnmgnathmgnaaytgygaycaytgyytnwsncarcayggnwsnccnggnathccnggnccnccnggnccnathggnccngarggnccnmgnggnytnccnggnytnccnggnmgngayggngtnccnggnytngtnggngtnccnggnmgnccnggngtnmgnggnytnaarggnytnccnggnmgnaayggngaraarggnwsncarggn

SEQ ID NO: 1137 - DNA, 3375 bp, Artificial Sequence
  hCol-CNA42 (alpha1(XXII) THD)
  misc_feature (3)..(3): n is a, c, g, or t
  misc_feature (12)..(12): n is a, c, g, or t
  misc_feature (21)..(21): n is a, c, g, or t
  misc_feature (24)..(24): n is a, c, g, or t
  misc_feature (27)..(27): n is a, c, g, or t
  misc_feature (30)..(30): n is a, c, g, or t
  misc_feature (33)..(33): n is a, c, g, or t
  misc_feature (39)..(39): n is a, c, g, or t
  misc_feature (42)..(42): n is a, c, g, or t
  misc_feature (45)..(45): n is a, c, g, or t
  misc_feature (48)..(48): n is a, c, g, or t
  misc_feature (51)..(51): n is a, c, g, or t
  misc_feature (57)..(57): n is a, c, g, or t
  misc_feature (66)..(66): n is a, c, g, or t
  misc_feature (69)..(69): n is a, c, g, or t
  misc_feature (75)..(75): n is a, c, g, or t
  misc_feature (78)..(78): n is a, c, g, or t
  misc_feature (81)..(81): n is a, c, g, or t
  misc_feature (84)..(84): n is a, c, g, or t
  misc_feature (87)..(87): n is a, c, g, or t
  misc_feature (90)..(90): n is a, c, g, or t
  misc_feature (93)..(93): n is a, c, g, or t
  misc_feature (96)..(96): n is a, c, g, or t
  misc_feature (102)..(102): n is a, c, g, or t
  misc_feature (111)..(111): n is a, c, g, or t
  misc_feature (117)..(117): n is a, c, g, or t
  misc_feature (120)..(120): n is a, c, g, or t
  misc_feature (126)..(126): n is a, c, g, or t
  misc_feature (129)..(129): n is a, c, g, or t
  misc_feature (135)..(135): n is a, c, g, or t
  misc_feature (141)..(141): n is a, c, g, or t
  misc_feature (150)..(150): n is a, c, g, or t
  misc_feature (159)..(159): n is a, c, g, or t
  misc_feature (162)..(162): n is a, c, g, or t
  misc_feature (165)..(165): n is a, c, g, or t
  misc_feature (168)..(168): n is a, c, g, or t
  misc_feature (171)..(171): n is a, c, g, or t
  misc_feature (174)..(174): n is a, c, g, or t
  misc_feature (177)..(177): n is a, c, g, or t
  misc_feature (180)..(180): n is a, c, g, or t
  misc_feature (183)..(183): n is a, c, g, or t
  misc_feature (186)..(186): n is a, c, g, or t
  misc_feature (189)..(189): n is a, c, g, or t
  misc_feature (195)..(195): n is a, c, g, or t
  misc_feature (198)..(198): n is a, c, g, or t
  misc_feature (204)..(204): n is a, c, g, or t
  misc_feature (210)..(210): n is a, c, g, or t
  misc_feature (213)..(213): n is a, c, g, or t
  misc_feature (219)..(219): n is a, c, g, or t
  misc_feature (222)..(222): n is a, c, g, or t
  misc_feature (228)..(228): n is a, c, g, or t
  misc_feature (231)..(231): n is a, c, g, or t
  misc_feature (237)..(237): n is a, c, g, or t
  misc_feature (240)..(240): n is a, c, g, or t
  misc_feature (243)..(243): n is a, c, g, or t
  misc_feature (246)..(246): n is a, c, g, or t
  misc_feature (249)..(249): n is a, c, g, or t
  misc_feature (255)..(255): n is a, c, g, or t
  misc_feature (258)..(258): n is a, c, g, or t
  misc_feature (264)..(264): n is a, c, g, or t
  misc_feature (267)..(267): n is a, c, g, or t
  misc_feature (270)..(270): n is a, c, g, or t
  misc_feature (276)..(276): n is a, c, g, or t
  misc_feature (279)..(279): n is a, c, g, or t
  misc_feature (282)..(282): n is a, c, g, or t
  misc_feature (285)..(285): n is a, c, g, or t
  misc_feature (288)..(288): n is a, c, g, or t
  misc_feature (291)..(291): n is a, c, g, or t
  misc_feature (294)..(294): n is a, c, g, or t
  misc_feature (297)..(297): n is a, c, g, or t
  misc_feature (300)..(300): n is a, c, g, or t
  misc_feature (303)..(303): n is a, c, g, or t
  misc_feature (306)..(306): n is a, c, g, or t
  misc_feature (309)..(309): n is a, c, g, or t
  misc_feature (312)..(312): n is a, c, g, or t
  misc_feature (315)..(315): n is a, c, g, or t
  misc_feature (318)..(318): n is a, c, g, or t
  misc_feature (321)..(321): n is a, c, g, or t
  misc_feature (324)..(324): n is a, c, g, or t
  misc_feature (330)..(330): n is a, c, g, or t
  misc_feature (336)..(336): n is a, c, g, or t
  misc_feature (339)..(339): n is a, c, g, or t
  misc_feature (348)..(348): n is a, c, g, or t
  misc_feature (351)..(351): n is a, c, g, or t
  misc_feature (354)..(354): n is a, c, g, or t
  misc_feature (357)..(357): n is a, c, g, or t
  misc_feature (366)..(366): n is a, c, g, or t
  misc_feature (372)..(372): n is a, c, g, or t
  misc_feature (375)..(375): n is a, c, g, or t
  misc_feature (378)..(378): n is a, c, g, or t
  misc_feature (384)..(384): n is a, c, g, or t
  misc_feature (390)..(390): n is a, c, g, or t
  misc_feature (393)..(393): n is a, c, g, or t
  misc_feature (399)..(399): n is a, c, g, or t
  misc_feature (402)..(402): n is a, c, g, or t
  misc_feature (408)..(408): n is a, c, g, or t
  misc_feature (411)..(411): n is a, c, g, or t
  misc_feature (420)..(420): n is a, c, g, or t
  misc_feature (423)..(423): n is a, c, g, or t
  misc_feature (426)..(426): n is a, c, g, or t
  misc_feature (429)..(429): n is a, c, g, or t
  misc_feature (432)..(432): n is a, c, g, or t
  misc_feature (435)..(435): n is a, c, g, or t
  misc_feature (438)..(438): n is a, c, g, or t
  misc_feature (441)..(441): n is a, c, g, or t
  misc_feature (444)..(444): n is a, c, g, or t
  misc_feature (447)..(447): n is a, c, g, or t
  misc_feature (450)..(450): n is a, c, g, or t
  misc_feature (456)..(456): n is a, c, g, or t
  misc_feature (465)..(465): n is a, c, g, or t
  misc_feature (471)..(471): n is a, c, g, or t
  misc_feature (474)..(474): n is a, c, g, or t
  misc_feature (477)..(477): n is a, c, g, or t
  misc_feature (480)..(480): n is a, c, g, or t
  misc_feature (483)..(483): n is a, c, g, or t
  misc_feature (486)..(486): n is a, c, g, or t
  misc_feature (489)..(489): n is a, c, g, or t
  misc_feature (492)..(492): n is a, c, g, or t
  misc_feature (495)..(495): n is a, c, g, or t
  misc_feature (498)..(498): n is a, c, g, or t
  misc_feature (501)..(501): n is a, c, g, or t
  misc_feature (504)..(504): n is a, c, g, or t
  misc_feature (507)..(507): n is a, c, g, or t
  misc_feature (510)..(510): n is a, c, g, or t
  misc_feature (522)..(522): n is a, c, g, or t
  misc_feature (525)..(525): n is a, c, g, or t
  misc_feature (531)..(531): n is a, c, g, or t
  misc_feature (540)..(540): n is a, c, g, or t
  misc_feature (543)..(543): n is a, c, g, or t
  misc_feature (546)..(546): n is a, c, g, or t
  misc_feature (549)..(549): n is a, c, g, or t
  misc_feature (552)..(552): n is a, c, g, or t
  misc_feature (555)..(555): n is a, c, g, or t
  misc_feature (558)..(558): n is a, c, g, or t
  misc_feature (567)..(567): n is a, c, g, or t
  misc_feature (570)..(570): n is a, c, g, or t
  misc_feature (573)..(573): n is a, c, g, or t
  misc_feature (576)..(576): n is a, c, g, or t
  misc_feature (579)..(579): n is a, c, g, or t
  misc_feature (582)..(582): n is a, c, g, or t
  misc_feature (585)..(585): n is a, c, g, or t
  misc_feature (588)..(588): n is a, c, g, or t
  misc_feature (591)..(591): n is a, c, g, or t
  misc_feature (594)..(594): n is a, c, g, or t
  misc_feature (597)..(597): n is a, c, g, or t
  misc_feature (603)..(603): n is a, c, g, or t
  misc_feature (606)..(606): n is a, c, g, or t
  misc_feature (612)..(612): n is a, c, g, or t
  misc_feature (615)..(615): n is a, c, g, or t
  misc_feature (621)..(621): n is a, c, g, or t
  misc_feature (624)..(624): n is a, c, g, or t
  misc_feature (627)..(627): n is a, c, g, or t
  misc_feature (630)..(630): n is a, c, g, or t
  misc_feature (633)..(633): n is a, c, g, or t
  misc_feature (639)..(639): n is a, c, g, or t
  misc_feature (642)..(642): n is a, c, g, or t
  misc_feature (645)..(645): n is a, c, g, or t
  misc_feature (648)..(648): n is a, c, g, or t
  misc_feature (657)..(657): n is a, c, g, or t
  misc_feature (666)..(666): n is a, c, g, or t
  misc_feature (669)..(669): n is a, c, g, or t
  misc_feature (672)..(672): n is a, c, g, or t
  misc_feature (675)..(675): n is a, c, g, or t
  misc_feature (681)..(681): n is a, c, g, or t
  misc_feature (684)..(684): n is a, c, g, or t
  misc_feature (687)..(687): n is a, c, g, or t
  misc_feature (690)..(690): n is a, c, g, or t
  misc_feature (693)..(693): n is a, c, g, or t
  misc_feature (696)..(696): n is a, c, g, or t
  misc_feature (702)..(702): n is a, c, g, or t
  misc_feature (705)..(705): n is a, c, g, or t
  misc_feature (708)..(708): n is a, c, g, or t
  misc_feature (711)..(711): n is a, c, g, or t
  misc_feature (714)..(714): n is a, c, g, or t
  misc_feature (717)..(717): n is a, c, g, or t
  misc_feature (720)..(720): n is a, c, g, or t
  misc_feature (723)..(723): n is a, c, g, or t
  misc_feature (726)..(726): n is a, c, g, or t
  misc_feature (729)..(729): n is a, c, g, or t
  misc_feature (732)..(732): n is a, c, g, or t
  misc_feature (735)..(735): n is a, c, g, or t
  misc_feature (738)..(738): n is a, c, g, or t
  misc_feature (741)..(741): n is a, c, g, or t
  misc_feature (744)..(744): n is a, c, g, or t
  misc_feature (747)..(747): n is a, c, g, or t
  misc_feature (750)..(750): n is a, c, g, or t
  misc_feature (753)..(753): n is a, c, g, or t
  misc_feature (756)..(756): n is a, c, g, or t
  misc_feature (759)..(759): n is a, c, g, or t
  misc_feature (762)..(762): n is a, c, g, or t
  misc_feature (765)..(765): n is a, c, g, or t
  misc_feature (774)..(774): n is a, c, g, or t
  misc_feature (780)..(780): n is a, c, g, or t
  misc_feature (783)..(783): n is a, c, g, or t
  misc_feature (789)..(789): n is a, c, g, or t
  misc_feature (792)..(792): n is a, c, g, or t
  misc_feature (795)..(795): n is a, c, g, or t
  misc_feature (798)..(798): n is a, c, g, or t
  misc_feature (801)..(801): n is a, c, g, or t
  misc_feature (804)..(804): n is a, c, g, or t
  misc_feature (807)..(807): n is a, c, g, or t
  misc_feature (810)..(810): n is a, c, g, or t
  misc_feature (813)..(813): n is a, c, g, or t
  misc_feature (816)..(816): n is a, c, g, or t
  misc_feature (819)..(819): n is a, c, g, or t
  misc_feature (828)..(828): n is a, c, g, or t
  misc_feature (831)..(831): n is a, c, g, or t
  misc_feature (837)..(837): n is a, c, g, or t
  misc_feature (840)..(840): n is a, c, g, or t
  misc_feature (843)..(843): n is a, c, g, or t
  misc_feature (846)..(846): n is a, c, g, or t
  misc_feature (849)..(849): n is a, c, g, or t
  misc_feature (852)..(852): n is a, c, g, or t
  misc_feature (855)..(855): n is a, c, g, or t
  misc_feature (858)..(858): n is a, c, g, or t
  misc_feature (864)..(864): n is a, c, g, or t
  misc_feature (870)..(870): n is a, c, g, or t
  misc_feature (873)..(873): n is a, c, g, or t
  misc_feature (879)..(879): n is a, c, g, or t
  misc_feature (882)..(882): n is a, c, g, or t
  misc_feature (891)..(891): n is a, c, g, or t
  misc_feature (894)..(894): n is a, c, g, or t
  misc_feature (897)..(897): n is a, c, g, or t
  misc_feature (900)..(900): n is a, c, g, or t
  misc_feature (906)..(906): n is a, c, g, or t
  misc_feature (909)..(909): n is a, c, g, or t
  misc_feature (912)..(912): n is a, c, g, or t
  misc_feature (915)..(915): n is a, c, g, or t
  misc_feature (918)..(918): n is a, c, g, or t
  misc_feature (927)..(927): n is a, c, g, or t
  misc_feature (936)..(936): n is a, c, g, or t
  misc_feature (939)..(939): n is a, c, g, or t
  misc_feature (942)..(942): n is a, c, g, or t
  misc_feature (945)..(945): n is a, c, g, or t
  misc_feature (948)..(948): n is a, c, g, or t
  misc_feature (951)..(951): n is a, c, g, or t
  misc_feature (954)..(954): n is a, c, g, or t
  misc_feature (963)..(963): n is a, c, g, or t
  misc_feature (969)..(969): n is a, c, g, or t
  misc_feature (972)..(972): n is a, c, g, or t
  misc_feature (975)..(975): n is a, c, g, or t
  misc_feature (978)..(978): n is a, c, g, or t
  misc_feature (981)..(981): n is a, c, g, or t
  misc_feature (984)..(984): n is a, c, g, or t
  misc_feature (987)..(987): n is a, c, g, or t
  misc_feature (990)..(990): n is a, c, g, or t
  misc_feature (996)..(996): n is a, c, g, or t
  misc_feature (999)..(999): n is a, c, g, or t
  misc_feature (1002)..(1002): n is a, c, g, or t
  misc_feature (1005)..(1005): n is a, c, g, or t
  misc_feature (1008)..(1008): n is a, c, g, or t
  misc_feature (1017)..(1017): n is a, c, g, or t
  misc_feature (1026)..(1026): n is a, c, g, or t
  misc_feature (1035)..(1035): n is a, c, g, or t
  misc_feature (1041)..(1041): n is a, c, g, or t
  misc_feature (1044)..(1044): n is a, c, g, or t
  misc_feature (1047)..(1047): n is a, c, g, or t
  misc_feature (1050)..(1050): n is a, c, g, or t
  misc_feature (1053)..(1053): n is a, c, g, or t
  misc_feature (1056)..(1056): n is a, c, g, or t
  misc_feature (1062)..(1062): n is a, c, g, or t
  misc_feature (1068)..(1068): n is a, c, g, or t
  misc_feature (1071)..(1071): n is a, c, g, or t
  misc_feature (1080)..(1080): n is a, c, g, or t
  misc_feature (1086)..(1086): n is a, c, g, or t
  misc_feature (1089)..(1089): n is a, c, g, or t
  misc_feature (1092)..(1092): n is a, c, g, or t
  misc_feature (1095)..(1095): n is a, c, g, or t
  misc_feature (1098)..(1098): n is a, c, g, or t
  misc_feature (1101)..(1101): n is a, c, g, or t
  misc_feature (1104)..(1104): n is a, c, g, or t
  misc_feature (1107)..(1107): n is a, c, g, or t
  misc_feature (1110)..(1110): n is a, c, g, or t
  misc_feature (1113)..(1113): n is a, c, g, or t
  misc_feature (1116)..(1116): n is a, c, g, or t
  misc_feature (1119)..(1119): n is a, c, g, or t
  misc_feature (1122)..(1122): n is a, c, g, or t
  misc_feature (1125)..(1125): n is a, c, g, or t
  misc_feature (1128)..(1128): n is a, c, g, or t
  misc_feature (1134)..(1134): n is a, c, g, or t
  misc_feature (1137)..(1137): n is a, c, g, or t
  misc_feature (1143)..(1143): n is a, c, g, or t
  misc_feature (1146)..(1146): n is a, c, g, or t
  misc_feature (1152)..(1152): n is a, c, g, or t
  misc_feature (1155)..(1155): n is a, c, g, or t
  misc_feature (1164)..(1164): n is a, c, g, or t
  misc_feature (1167)..(1167): n is a, c, g, or t
  misc_feature (1173)..(1173): n is a, c, g, or t
  misc_feature (1182)..(1182): n is a, c, g, or t
  misc_feature (1188)..(1188): n is a, c, g, or t
  misc_feature (1191)..(1191): n is a, c, g, or t
  misc_feature (1194)..(1194): n is a, c, g, or t
  misc_feature (1197)..(1197): n is a, c, g, or t
  misc_feature (1200)..(1200): n is a, c, g, or t
  misc_feature (1206)..(1206): n is a, c, g, or t
  misc_feature (1209)..(1209): n is a, c, g, or t
  misc_feature (1212)..(1212): n is a, c, g, or t
  misc_feature (1218)..(1218): n is a, c, g, or t
  misc_feature (1221)..(1221): n is a, c, g, or t
  misc_feature (1224)..(1224): n is a, c, g, or t
  misc_feature (1227)..(1227): n is a, c, g, or t
  misc_feature (1233)..(1233): n is a, c, g, or t
  misc_feature (1236)..(1236): n is a, c, g, or t
  misc_feature (1239)..(1239): n is a, c, g, or t
  misc_feature (1245)..(1245): n is a, c, g, or t
  misc_feature (1248)..(1248): n is a, c, g, or t
  misc_feature (1251)..(1251): n is a, c, g, or t
  misc_feature (1254)..(1254): n is a, c, g, or t
  misc_feature (1257)..(1257): n is a, c, g, or t
  misc_feature (1260)..(1260): n is a, c, g, or t
  misc_feature (1263)..(1263): n is a, c, g, or t
  misc_feature (1266)..(1266): n is a, c, g, or t
  misc_feature (1272)..(1272): n is a, c, g, or t
  misc_feature (1281)..(1281): n is a, c, g, or t
  misc_feature (1284)..(1284): n is a, c, g, or t
  misc_feature (1290)..(1290): n is a, c, g, or t
  misc_feature (1293)..(1293): n is a, c, g, or t
  misc_feature (1296)..(1296): n is a, c, g, or t
  misc_feature (1299)..(1299): n is a, c, g, or t
  misc_feature (1302)..(1302): n is a, c, g, or t
  misc_feature (1305)..(1305): n is a, c, g, or t
  misc_feature (1308)..(1308): n is a, c, g, or t
  misc_feature (1314)..(1314): n is a, c, g, or t
  misc_feature (1317)..(1317): n is a, c, g, or t
  misc_feature (1320)..(1320): n is a, c, g, or t
  misc_feature (1323)..(1323): n is a, c, g, or t
  misc_feature (1326)..(1326): n is a, c, g, or t
  misc_feature (1332)..(1332): n is a, c, g, or t
  misc_feature (1335)..(1335): n is a, c, g, or t
  misc_feature (1338)..(1338): n is a, c, g, or t
  misc_feature (1341)..(1341): n is a, c, g, or t
  misc_feature (1344)..(1344): n is a, c, g, or t
  misc_feature (1347)..(1347): n is a, c, g, or t
  misc_feature (1350)..(1350): n is a, c, g, or t
  misc_feature (1353)..(1353): n is a, c, g, or t
  misc_feature (1356)..(1356): n is a, c, g, or t
  misc_feature (1359)..(1359): n is a, c, g, or t
  misc_feature (1362)..(1362): n is a, c, g, or t
  misc_feature (1365)..(1365): n is a, c, g, or t
  misc_feature (1368)..(1368): n is a, c, g, or t
  misc_feature (1371)..(1371): n is a, c, g, or t
  misc_feature (1374)..(1374): n is a, c, g, or t
  misc_feature (1377)..(1377): n is a, c, g, or t
  misc_feature (1380)..(1380): n is a, c, g, or t
  misc_feature (1383)..(1383): n is a, c, g, or t
  misc_feature (1386)..(1386): n is a, c, g, or t
  misc_feature (1389)..(1389): n is a, c, g, or t
  misc_feature (1392)..(1392): n is a, c, g, or t
  misc_feature (1395)..(1395): n is a, c, g, or t
  misc_feature (1398)..(1398): n is a, c, g, or t
  misc_feature (1407)..(1407): n is a, c, g, or t
  misc_feature (1413)..(1413): n is a, c, g, or t
  misc_feature (1416)..(1416): n is a, c, g, or t
  misc_feature (1425)..(1425): n is a, c, g, or t
  misc_feature (1428)..(1428): n is a, c, g, or t
  misc_feature (1431)..(1431): n is a, c, g, or t
  misc_feature (1434)..(1434): n is a, c, g, or t
  misc_feature (1443)..(1443): n is a, c, g, or t
  misc_feature (1446)..(1446): n is a, c, g, or t
  misc_feature (1449)..(1449): n is a, c, g, or t
  misc_feature (1452)..(1452): n is a, c, g, or t
  misc_feature (1455)..(1455): n is a, c, g, or t
  misc_feature (1458)..(1458): n is a, c, g, or t
  misc_feature (1461)..(1461): n is a, c, g, or t
  misc_feature (1464)..(1464): n is a, c, g, or t
  misc_feature (1467)..(1467): n is a, c, g, or t
  misc_feature (1470)..(1470): n is a, c, g, or t
  misc_feature (1476)..(1476): n is a, c, g, or t
  misc_feature (1479)..(1479): n is a, c, g, or t
  misc_feature (1482)..(1482): n is a, c, g, or t
  misc_feature (1485)..(1485): n is a, c, g, or t
  misc_feature (1488)..(1488): n is a, c, g, or t
  misc_feature (1491)..(1491): n is a, c, g, or t
  misc_feature (1494)..(1494): n is a, c, g, or t
  misc_feature (1497)..(1497): n is a, c, g, or t
  misc_feature (1500)..(1500): n is a, c, g, or t
  misc_feature (1503)..(1503): n is a, c, g, or t
  misc_feature (1506)..(1506): n is a, c, g, or t
  misc_feature (1512)..(1512): n is a, c, g, or t
  misc_feature (1521)..(1521): n is a, c, g, or t
  misc_feature (1527)..(1527): n is a, c, g, or t
  misc_feature (1530)..(1530): n is a, c, g, or t
  misc_feature (1533)..(1533): n is a, c, g, or t
  misc_feature (1536)..(1536): n is a, c, g, or t
  misc_feature (1539)..(1539): n is a, c, g, or t
  misc_feature (1542)..(1542): n is a, c, g, or t
  misc_feature (1545)..(1545): n is a, c, g, or t
  misc_feature (1548)..(1548): n is a, c, g, or t
  misc_feature (1551)..(1551): n is a, c, g, or t
  misc_feature (1554)..(1554): n is a, c, g, or t
  misc_feature (1557)..(1557): n is a, c, g, or t
  misc_feature (1560)..(1560): n is a, c, g, or t
  misc_feature (1563)..(1563): n is a, c, g, or t
  misc_feature (1566)..(1566): n is a, c, g, or t
  misc_feature (1569)..(1569): n is a, c, g, or t
  misc_feature (1575)..(1575): n is a, c, g, or t
  misc_feature (1578)..(1578): n is a, c, g, or t
  misc_feature (1584)..(1584): n is a, c, g, or t
  misc_feature (1590)..(1590): n is a, c, g, or t
  misc_feature (1593)..(1593): n is a, c, g, or t
  misc_feature (1596)..(1596): n is a, c, g, or t
  misc_feature (1599)..(1599): n is a, c, g, or t
  misc_feature (1611)..(1611): n is a, c, g, or t
  misc_feature (1614)..(1614): n is a, c, g, or t
  misc_feature (1617)..(1617): n is a, c, g, or t
  misc_feature (1620)..(1620): n is a, c, g, or t
  misc_feature (1629)..(1629): n is a, c, g, or t
  misc_feature (1635)..(1635): n is a, c, g, or t
  misc_feature (1641)..(1641): n is a, c, g, or t
  misc_feature (1644)..(1644): n is a, c, g, or t
  misc_feature (1647)..(1647): n is a, c, g, or t
  misc_feature (1650)..(1650): n is a, c, g, or t
  misc_feature (1653)..(1653): n is a, c, g, or t
  misc_feature (1659)..(1659): n is a, c, g, or t
  misc_feature (1662)..(1662): n is a, c, g, or t
  misc_feature (1665)..(1665): n is a, c, g, or t
  misc_feature (1668)..(1668): n is a, c, g, or t
  misc_feature (1671)..(1671): n is a, c, g, or t
  misc_feature (1674)..(1674): n is a, c, g, or t
  misc_feature (1677)..(1677): n is a, c, g, or t
  misc_feature (1680)..(1680): n is a, c, g, or t
  misc_feature (1686)..(1686): n is a, c, g, or t
  misc_feature (1689)..(1689): n is a, c, g, or t
  misc_feature (1695)..(1695): n is a, c, g, or t
  misc_feature (1698)..(1698): n is a, c, g, or t
  misc_feature (1701)..(1701): n is a, c, g, or t
  misc_feature (1704)..(1704): n is a, c, g, or t
  misc_feature (1707)..(1707): n is a, c, g, or t
  misc_feature (1710)..(1710): n is a, c, g, or t
  misc_feature (1713)..(1713): n is a, c, g, or t
  misc_feature (1716)..(1716): n is a, c, g, or t
  misc_feature (1719)..(1719): n is a, c, g, or t
  misc_feature (1722)..(1722): n is a, c, g, or t
  misc_feature (1725)..(1725): n is a, c, g, or t
  misc_feature (1728)..(1728): n is a, c, g, or t
  misc_feature (1731)..(1731): n is a, c, g, or t
  misc_feature (1740)..(1740): n is a, c, g, or t
  misc_feature (1743)..(1743): n is a, c, g, or t
  misc_feature (1746)..(1746): n is a, c, g, or t
  misc_feature (1749)..(1749): n is a, c, g, or t
  misc_feature (1752)..(1752): n is a, c, g, or t
  misc_feature (1755)..(1755): n is a, c, g, or t
  misc_feature (1758)..(1758): n is a, c, g, or t
  misc_feature (1761)..(1761): n is a, c, g, or t
  misc_feature (1764)..(1764): n is a, c, g, or t
  misc_feature (1767)..(1767): n is a, c, g, or t
  misc_feature (1773)..(1773): n is a, c, g, or t
  misc_feature (1776)..(1776): n is a, c, g, or t
  misc_feature (1779)..(1779): n is a, c, g, or t
  misc_feature (1785)..(1785): n is a, c, g, or t
  misc_feature (1788)..(1788): n is a, c, g, or t
  misc_feature (1791)..(1791): n is a, c, g, or t
  misc_feature (1794)..(1794): n is a, c, g, or t
  misc_feature (1797)..(1797): n is a, c, g, or t
  misc_feature (1803)..(1803): n is a, c, g, or t
  misc_feature (1806)..(1806): n is a, c, g, or t
  misc_feature (1809)..(1809): n is a, c, g, or t
  misc_feature (1812)..(1812): n is a, c, g, or t
  misc_feature (1818)..(1818): n is a, c, g, or t
  misc_feature (1821)..(1821): n is a, c, g, or t
  misc_feature (1827)..(1827): n is a, c, g, or t
  misc_feature (1830)..(1830): n is a, c, g, or t
  misc_feature (1833)..(1833): n is a, c, g, or t
  misc_feature (1836)..(1836): n is a, c, g, or t
  misc_feature (1839)..(1839): n is a, c, g, or t
  misc_feature (1845)..(1845): n is a, c, g, or t
  misc_feature (1848)..(1848): n is a, c, g, or t
  misc_feature (1851)..(1851): n is a, c, g, or t
  misc_feature (1854)..(1854): n is a, c, g, or t
  misc_feature (1857)..(1857): n is a, c, g, or t
  misc_feature (1860)..(1860): n is a, c, g, or t
  misc_feature (1863)..(1863): n is a, c, g, or t
  misc_feature (1866)..(1866): n is a, c, g, or t
  misc_feature (1869)..(1869): n is a, c, g, or t
  misc_feature (1872)..(1872): n is a, c, g, or t
  misc_feature (1884)..(1884): n is a, c, g, or t
  misc_feature (1887)..(1887): n is a, c, g, or t
  misc_feature (1890)..(1890): n is a, c, g, or t
  misc_feature (1899)..(1899): n is a, c, g, or t
  misc_feature (1914)..(1914): n is a, c, g, or t
  misc_feature (1917)..(1917): n is a, c, g, or t
  misc_feature (1920)..(1920): n is a, c, g, or t
  misc_feature (1923)..(1923): n is a, c, g, or t
  misc_feature (1926)..(1926): n is a, c, g, or t
  misc_feature (1929)..(1929): n is a, c, g, or t
  misc_feature (1932)..(1932): n is a, c, g, or t
  misc_feature (1935)..(1935): n is a, c, g, or t
  misc_feature (1938)..(1938): n is a, c, g, or t
  misc_feature (1941)..(1941): n is a, c, g, or t
  misc_feature (1944)..(1944): n is a, c, g, or t
  misc_feature (1947)..(1947): n is a, c, g, or t
  misc_feature (1956)..(1956): n is a, c, g, or t
  misc_feature (1965)..(1965): n is a, c, g, or t
  misc_feature (1968)..(1968): n is a, c, g, or t
  misc_feature (1971)..(1971): n is a, c, g, or t
  misc_feature (1974)..(1974): n is a, c, g, or t
  misc_feature (1980)..(1980): n is a, c, g, or t
  misc_feature (1983)..(1983): n is a, c, g, or t
  misc_feature (1986)..(1986): n is a, c, g, or t
  misc_feature (1992)..(1992): n is a, c, g, or t
  misc_feature (1995)..(1995): n is a, c, g, or t
  misc_feature (2001)..(2001): n is a, c, g, or t
  misc_feature (2010)..(2010): n is a, c, g, or t
  misc_feature (2016)..(2016): n is a, c, g, or t
  misc_feature (2019)..(2019): n is a, c, g, or t
  misc_feature (2022)..(2022): n is a, c, g, or t
  misc_feature (2025)..(2025): n is a, c, g, or t
  misc_feature (2028)..(2028): n is a, c, g, or t
  misc_feature (2031)..(2031): n is a, c, g, or t
  misc_feature (2034)..(2034): n is a, c, g, or t
  misc_feature (2037)..(2037): n is a, c, g, or t
  misc_feature (2040)..(2040): n is a, c, g, or t
  misc_feature (2043)..(2043): n is a, c, g, or t
  misc_feature (2046)..(2046): n is a, c, g, or t
  misc_feature (2052)..(2052): n is a, c, g, or t
  misc_feature (2055)..(2055): n is a, c, g, or t
  misc_feature (2058)..(2058): n is a, c, g, or t
  misc_feature (2064)..(2064): n is a, c, g, or t
  misc_feature (2067)..(2067): n is a, c, g, or t
  misc_feature (2073)..(2073): n is a, c, g, or t
  misc_feature (2079)..(2079): n is a, c, g, or t
  misc_feature (2082)..(2082): n is a, c, g, or t
  misc_feature (2085)..(2085): n is a, c, g, or t
  misc_feature (2091)..(2091): n is a, c, g, or t
  misc_feature (2097)..(2097): n is a, c, g, or t
  misc_feature (2100)..(2100): n is a, c, g, or t
  misc_feature (2109)..(2109): n is a, c, g, or t
  misc_feature (2118)..(2118): n is a, c, g, or t
  misc_feature (2124)..(2124): n is a, c, g, or t
  misc_feature (2127)..(2127): n is a, c, g, or t
  misc_feature (2130)..(2130): n is a, c, g, or t
  misc_feature (2133)..(2133): n is a, c, g, or t
  misc_feature (2136)..(2136): n is a, c, g, or t
  misc_feature (2145)..(2145): n is a, c, g, or t
  misc_feature (2148)..(2148): n is a, c, g, or t
  misc_feature (2151)..(2151): n is a, c, g, or t
  misc_feature (2154)..(2154): n is a, c, g, or t
  misc_feature (2160)..(2160): n is a, c, g, or t
  misc_feature (2163)..(2163): n is a, c, g, or t
  misc_feature (2166)..(2166): n is a, c, g, or t
  misc_feature (2169)..(2169): n is a, c, g, or t
  misc_feature (2172)..(2172): n is a, c, g, or t
  misc_feature (2175)..(2175): n is a, c, g, or t
  misc_feature (2181)..(2181): n is a, c, g, or t
  misc_feature (2187)..(2187): n is a, c, g, or t
  misc_feature (2190)..(2190): n is a, c, g, or t
  misc_feature (2193)..(2193): n is a, c, g, or t
  misc_feature (2196)..(2196): n is a, c, g, or t
  misc_feature (2199)..(2199): n is a, c, g, or t
  misc_feature (2202)..(2202): n is a, c, g, or t
  misc_feature (2205)..(2205): n is a, c, g, or t
  misc_feature (2208)..(2208): n is a, c, g, or t
  misc_feature (2217)..(2217): n is a, c, g, or t
  misc_feature (2220)..(2220): n is a, c, g, or t
  misc_feature (2223)..(2223): n is a, c, g, or t
  misc_feature (2226)..(2226): n is a, c, g, or t
  misc_feature (2235)..(2235): n is a, c, g, or t
  misc_feature (2238)..(2238): n is a, c, g, or t
  misc_feature (2241)..(2241): n is a, c, g, or t
  misc_feature (2244)..(2244): n is a, c, g, or t
  misc_feature (2247)..(2247): n is a, c, g, or t
  misc_feature (2253)..(2253): n is a, c, g, or t
  misc_feature (2256)..(2256): n is a, c, g, or t
  misc_feature (2259)..(2259): n is a, c, g, or t
  misc_feature (2262)..(2262): n is a, c, g, or t
  misc_feature (2265)..(2265): n is a, c, g, or t
  misc_feature (2268)..(2268): n is a, c, g, or t
  misc_feature (2271)..(2271): n is a, c, g, or t
  misc_feature (2277)..(2277): n is a, c, g, or t
  misc_feature (2280)..(2280): n is a, c, g, or t
  misc_feature (2289)..(2289): n is a, c, g, or t
  misc_feature (2298)..(2298): n is a, c, g, or t
  misc_feature (2301)..(2301): n is a, c, g, or t
  misc_feature (2307)..(2307): n is a, c, g, or t
  misc_feature (2313)..(2313): n is a, c, g, or t
  misc_feature (2316)..(2316): n is a, c, g, or t
  misc_feature (2319)..(2319): n is a, c, g, or t
  misc_feature (2322)..(2322): n is a, c, g, or t
  misc_feature (2325)..(2325): n is a, c, g, or t
  misc_feature (2331)..(2331): n is a, c, g, or t
  misc_feature (2334)..(2334): n is a, c, g, or t
  misc_feature (2340)..(2340): n is a, c, g, or t
  misc_feature (2343)..(2343): n is a, c, g, or t
  misc_feature (2349)..(2349): n is a, c, g, or t
  misc_feature (2352)..(2352): n is a, c, g, or t
  misc_feature (2355)..(2355): n is a, c, g, or t
  misc_feature (2358)..(2358): n is a, c, g, or t
  misc_feature (2361)..(2361): n is a, c, g, or t
  misc_feature (2364)..(2364): n is a, c, g, or t
  misc_feature (2370)..(2370): n is a, c, g, or t
  misc_feature (2373)..(2373): n is a, c, g, or t
  misc_feature (2376)..(2376): n is a, c, g, or t
  misc_feature (2379)..(2379): n is a, c, g, or t
  misc_feature (2382)..(2382): n is a, c, g, or t
  misc_feature (2385)..(2385): n is a, c, g, or t
  misc_feature (2388)..(2388): n is a, c, g, or t
  misc_feature (2397)..(2397): n is a, c, g, or t
  misc_feature (2403)..(2403): n is a, c, g, or t
  misc_feature (2406)..(2406): n is a, c, g, or t
  misc_feature (2412)..(2412): n is a, c, g, or t
  misc_feature (2415)..(2415): n is a, c, g, or t
  misc_feature (2418)..(2418): n is a, c, g, or t
  misc_feature (2421)..(2421): n is a, c, g, or t
  misc_feature (2424)..(2424): n is a, c, g, or t
  misc_feature (2427)..(2427): n is a, c, g, or t
  misc_feature (2430)..(2430): n is a, c, g, or t
  misc_feature (2433)..(2433): n is a, c, g, or t
  misc_feature (2439)..(2439): n is a, c, g, or t
  misc_feature (2442)..(2442): n is a, c, g, or t
  misc_feature (2445)..(2445): n is a, c, g, or t
  misc_feature (2451)..(2451): n is a, c, g, or t
  misc_feature (2454)..(2454): n is a, c, g, or t
  misc_feature (2457)..(2457): n is a, c, g, or t
  misc_feature (2460)..(2460): n is a, c, g, or t
  misc_feature (2469)..(2469): n is a, c, g, or t
  misc_feature (2472)..(2472): n is a, c, g, or t
  misc_feature (2475)..(2475): n is a, c, g, or t
  misc_feature (2478)..(2478): n is a, c, g, or t
  misc_feature (2487)..(2487): n is a, c, g, or t
  misc_feature (2493)..(2493): n is a, c, g, or t
  misc_feature (2496)..(2496): n is a, c, g, or t
  misc_feature (2499)..(2499): n is a, c, g, or t
  misc_feature (2502)..(2502): n is a, c, g, or t
  misc_feature (2505)..(2505): n is a, c, g, or t
  misc_feature (2508)..(2508): n is a, c, g, or t
  misc_feature (2514)..(2514): n is a, c, g, or t
  misc_feature (2517)..(2517): n is a, c, g, or t
  misc_feature (2523)..(2523): n is a, c, g, or t
  misc_feature (2526)..(2526): n is a, c, g, or t
  misc_feature (2529)..(2529): n is a, c, g, or t
  misc_feature (2532)..(2532): n is a, c, g, or t
  misc_feature (2535)..(2535): n is a, c, g, or t
  misc_feature (2538)..(2538): n is a, c, g, or t
  misc_feature (2541)..(2541): n is a, c, g, or t
  misc_feature (2550)..(2550): n is a, c, g, or t
  misc_feature (2553)..(2553): n is a, c, g, or t
  misc_feature (2556)..(2556): n is a, c, g, or t
  misc_feature (2559)..(2559): n is a, c, g, or t
  misc_feature (2562)..(2562): n is a, c, g, or t
  misc_feature (2565)..(2565): n is a, c, g, or t
  misc_feature (2568)..(2568): n is a, c, g, or t
  misc_feature (2574)..(2574): n is a, c, g, or t
  misc_feature (2577)..(2577): n is a, c, g, or t
  misc_feature (2580)..(2580): n is a, c, g, or t
  misc_feature (2583)..(2583): n is a, c, g, or t
  misc_feature (2586)..(2586): n is a, c, g, or t
  misc_feature (2589)..(2589): n is a, c, g, or t
  misc_feature (2592)..(2592): n is a, c, g, or t
  misc_feature (2595)..(2595): n is a, c, g, or t
  misc_feature (2604)..(2604): n is a, c, g, or t
  misc_feature (2607)..(2607): n is a, c, g, or t
  misc_feature (2613)..(2613): n is a, c, g, or t
  misc_feature (2622)..(2622): n is a, c, g, or t
  misc_feature (2625)..(2625): n is a, c, g, or t
  misc_feature (2628)..(2628): n is a, c, g, or t
  misc_feature (2631)..(2631): n is a, c, g, or t
  misc_feature (2634)..(2634): n is a, c, g, or t
  misc_feature (2637)..(2637): n is a, c, g, or t
  misc_feature (2640)..(2640): n is a, c, g, or t
  misc_feature (2646)..(2646): n is a, c, g, or t
  misc_feature (2649)..(2649): n is a, c, g, or t
  misc_feature (2652)..(2652): n is a, c, g, or t
  misc_feature (2655)..(2655): n is a, c, g, or t
  misc_feature (2658)..(2658): n is a, c, g, or t
  misc_feature (2661)..(2661): n is a, c, g, or t
  misc_feature (2664)..(2664): n is a, c, g, or t
  misc_feature (2667)..(2667): n is a, c, g, or t
  misc_feature (2673)..(2673): n is a, c, g, or t
  misc_feature (2676)..(2676): n is a, c, g, or t
  misc_feature (2685)..(2685): n is a, c, g, or t
  misc_feature (2688)..(2688): n is a, c, g, or t
  misc_feature (2691)..(2691): n is a, c, g, or t
  misc_feature (2694)..(2694): n is a, c, g, or t
  misc_feature (2703)..(2703): n is a, c, g, or t
  misc_feature (2706)..(2706): n is a, c, g, or t
  misc_feature (2709)..(2709): n is a, c, g, or t
  misc_feature (2712)..(2712): n is a, c, g, or t
  misc_feature (2718)..(2718): n is a, c, g, or t
  misc_feature (2721)..(2721): n is a, c, g, or t
  misc_feature (2727)..(2727): n is a, c, g, or t
  misc_feature (2730)..(2730): n is a, c, g, or t
  misc_feature (2739)..(2739): n is a, c, g, or t
  misc_feature (2745)..(2745): n is a, c, g, or t
  misc_feature (2748)..(2748): n is a, c, g, or t
  misc_feature (2754)..(2754): n is a, c, g, or t
  misc_feature (2757)..(2757): n is a, c, g, or t
  misc_feature (2766)..(2766): n is a, c, g, or t
  misc_feature (2775)..(2775): n is a, c, g, or t
  misc_feature (2778)..(2778): n is a, c, g, or t
  misc_feature (2781)..(2781): n is a, c, g, or t
  misc_feature (2784)..(2784): n is a, c, g, or t
  misc_feature (2787)..(2787): n is a, c, g, or t
  misc_feature (2793)..(2793): n is a, c, g, or t
  misc_feature (2799)..(2799): n is a, c, g, or t
  misc_feature (2802)..(2802): n is a, c, g, or t
  misc_feature (2808)..(2808): n is a, c, g, or t
  misc_feature (2811)..(2811): n is a, c, g, or t
  misc_feature (2817)..(2817): n is a, c, g, or t
  misc_feature (2820)..(2820): n is a, c, g, or t
  misc_feature (2829)..(2829): n is a, c, g, or t
  misc_feature (2835)..(2835): n is a, c, g, or t
  misc_feature (2838)..(2838): n is a, c, g, or t
  misc_feature (2841)..(2841): n is a, c, g, or t
  misc_feature (2847)..(2847): n is a, c, g, or t
  misc_feature (2850)..(2850): n is a, c, g, or t
  misc_feature (2856)..(2856): n is a, c, g, or t
  misc_feature (2859)..(2859): n is a, c, g, or t
  misc_feature (2862)..(2862): n is a, c, g, or t
  misc_feature (2865)..(2865): n is a, c, g, or t
  misc_feature (2874)..(2874): n is a, c, g, or t
  misc_feature (2877)..(2877): n is a, c, g, or t
  misc_feature (2880)..(2880): n is a, c, g, or t
  misc_feature (2883)..(2883): n is a, c, g, or t
  misc_feature (2886)..(2886): n is a, c, g, or t
  misc_feature (2889)..(2889): n is a, c, g, or t
  misc_feature (2892)..(2892): n is a, c, g, or t
  misc_feature (2895)..(2895): n is a, c, g, or t
  misc_feature (2898)..(2898): n is a, c, g, or t
  misc_feature (2901)..(2901): n is a, c, g, or t
  misc_feature (2907)..(2907): n is a, c, g, or t
  misc_feature (2910)..(2910): n is a, c, g, or t
  misc_feature (2916)..(2916): n is a, c, g, or t
  misc_feature (2919)..(2919): n is a, c, g, or t
  misc_feature (2922)..(2922): n is a, c, g, or t
  misc_feature (2925)..(2925): n is a, c, g, or t
  misc_feature (2928)..(2928): n is a, c, g, or t
  misc_feature (2934)..(2934): n is a, c, g, or t
  misc_feature (2937)..(2937): n is a, c, g, or t
  misc_feature (2940)..(2940): n is a, c, g, or t
  misc_feature (2949)..(2949): n is a, c, g, or t
  misc_feature (2952)..(2952): n is a, c, g, or t
  misc_feature (2955)..(2955): n is a, c, g, or t
  misc_feature (2958)..(2958): n is a, c, g, or t
  misc_feature (2961)..(2961): n is a, c, g, or t
  misc_feature (2976)..(2976): n is a, c, g, or t
  misc_feature (2979)..(2979): n is a, c, g, or t
  misc_feature (2988)..(2988): n is a, c, g, or t
  misc_feature (2994)..(2994): n is a, c, g, or t
  misc_feature (2997)..(2997): n is a, c, g, or t
  misc_feature (3000)..(3000): n is a, c, g, or t
  misc_feature (3003)..(3003): n is a, c, g, or t
  misc_feature (3009)..(3009): n is a, c, g, or t
  misc_feature (3012)..(3012): n is a, c, g, or t
  misc_feature (3015)..(3015): n is a, c, g, or t
  misc_feature (3024)..(3024): n is a, c, g, or t
  misc_feature (3027)..(3027): n is a, c, g, or t
  misc_feature (3030)..(3030): n is a, c, g, or t
  misc_feature (3042)..(3042): n is a, c, g, or t
  misc_feature (3045)..(3045): n is a, c, g, or t
  misc_feature (3051)..(3051): n is a, c, g, or t
  misc_feature (3054)..(3054): n is a, c, g, or t
  misc_feature (3057)..(3057): n is a, c, g, or t
  misc_feature (3060)..(3060): n is a, c, g, or t
  misc_feature (3063)..(3063): n is a, c, g, or t
  misc_feature (3066)..(3066): n is a, c, g, or t
  misc_feature (3069)..(3069): n is a, c, g, or t
  misc_feature (3072)..(3072): n is a, c, g, or t
  misc_feature (3075)..(3075): n is a, c, g, or t
  misc_feature (3078)..(3078): n is a, c, g, or t
  misc_feature (3087)..(3087): n is a, c, g, or t
  misc_feature (3090)..(3090): n is a, c, g, or t
  misc_feature (3093)..(3093): n is a, c, g, or t
  misc_feature (3096)..(3096): n is a, c, g, or t
  misc_feature (3099)..(3099): n is a, c, g, or t
  misc_feature (3102)..(3102): n is a, c, g, or t
  misc_feature (3105)..(3105): n is a, c, g, or t
  misc_feature (3108)..(3108): n is a, c, g, or t
  misc_feature (3114)..(3114): n is a, c, g, or t
  misc_feature (3120)..(3120): n is a, c, g, or t
  misc_feature (3123)..(3123): n is a, c, g, or t
  misc_feature (3126)..(3126): n is a, c, g, or t
  misc_feature (3129)..(3129): n is a, c, g, or t
  misc_feature (3132)..(3132): n is a, c, g, or t
  misc_feature (3138)..(3138): n is a, c, g, or t
  misc_feature (3141)..(3141): n is a, c, g, or t
  misc_feature (3144)..(3144): n is a, c, g, or t
  misc_feature (3150)..(3150): n is a, c, g, or t
  misc_feature (3153)..(3153): n is a, c, g, or t
  misc_feature (3156)..(3156): n is a, c, g, or t
  misc_feature (3159)..(3159): n is a, c, g, or t
  misc_feature (3162)..(3162): n is a, c, g, or t
  misc_feature (3168)..(3168): n is a, c, g, or t
  misc_feature (3171)..(3171): n is a, c, g, or t
  misc_feature (3177)..(3177): n is a, c, g, or t
  misc_feature (3183)..(3183): n is a, c, g, or t
  misc_feature (3186)..(3186): n is a, c, g, or t
  misc_feature (3189)..(3189): n is a, c, g, or t
  misc_feature (3195)..(3195): n is a, c, g, or t
  misc_feature (3201)..(3201): n is a, c, g, or t
  misc_feature (3204)..(3204): n is a, c, g, or t
  misc_feature (3207)..(3207): n is a, c, g, or t
  misc_feature (3210)..(3210): n is a, c, g, or t
  misc_feature (3213)..(3213): n is a, c, g, or t
  misc_feature (3216)..(3216): n is a, c, g, or t
  misc_feature (3219)..(3219): n is a, c, g, or t
  misc_feature (3222)..(3222): n is a, c, g, or t
  misc_feature (3225)..(3225): n is a, c, g, or t
  misc_feature (3228)..(3228): n is a, c, g, or t
  misc_feature (3237)..(3237): n is a, c, g, or t
  misc_feature (3240)..(3240): n is a, c, g, or t
  misc_feature (3243)..(3243): n is a, c, g, or t
  misc_feature (3246)..(3246): n is a, c, g, or t
  misc_feature (3252)..(3252): n is a, c, g, or t
  misc_feature (3255)..(3255): n is a, c, g, or t
  misc_feature (3261)..(3261): n is a, c, g, or t
  misc_feature (3264)..(3264): n is a, c, g, or t
  misc_feature (3270)..(3270): n is a, c, g, or t
  misc_feature (3273)..(3273): n is a, c, g, or t
  misc_feature (3279)..(3279): n is a, c, g, or t
  misc_feature (3288)..(3288): n is a, c, g, or t
  misc_feature (3291)..(3291): n is a, c, g, or t
  misc_feature (3294)..(3294): n is a, c, g, or t
  misc_feature (3297)..(3297): n is a, c, g, or t
  misc_feature (3303)..(3303): n is a, c, g, or t
  misc_feature (3306)..(3306): n is a, c, g, or t
  misc_feature (3309)..(3309): n is a, c, g, or t
  misc_feature (3315)..(3315): n is a, c, g, or t
  misc_feature (3321)..(3321): n is a, c, g, or t
  misc_feature (3324)..(3324): n is a, c, g, or t
  misc_feature (3327)..(3327): n is a, c, g, or t
  misc_feature (3330)..(3330): n is a, c, g, or t
  misc_feature (3333)..(3333): n is a, c, g, or t
  misc_feature (3339)..(3339): n is a, c, g, or t
  misc_feature (3342)..(3342): n is a, c, g, or t
  misc_feature (3345)..(3345): n is a, c, g, or t
  misc_feature (3348)..(3348): n is a, c, g, or t
  misc_feature (3351)..(3351): n is a, c, g, or t
  misc_feature (3354)..(3354): n is a, c, g, or t
  misc_feature (3357)..(3357): n is a, c, g, or t
  misc_feature (3360)..(3360): n is a, c, g, or t
  misc_feature (3363)..(3363): n is a, c, g, or t
  misc_feature (3366)..(3366): n is a, c, g, or t
  misc_feature (3369)..(3369): n is a, c, g, or t
ggngaraarggngaratgggngtngcnggnccnatgggnytnccnggnccnaarggngayathggngcnathggnccngtnggngcnccnggnccnaarggngaraarggngaygtnggnathggnccnttyggncarggngaraarggngaraarggnwsnytnggnytnccnggnccnccnggnmgngayggnwsnaarggnatgmgnggngarccnggngarytnggngarccnggnytnccnggngargtnggnatgmgnggnccncarggnccnccnggnytnccnggnccnccnggnmgngtnggngcnccnggnytncarggngarmgnggngaraarggnacnmgnggngaraarggngarmgnggnytngayggnttyccnggnaarccnggngayacnggncarcarggnmgnccnggnccnwsnggngtngcnggnccncarggngaraarggngaygtnggnccngcnggnccnccnggngtnccnggnwsngtngtncarcargarggnytnaarggngarcarggngcnccnggnccnmgnggncaycarggngcnccnggnccnccnggngcnmgnggnccnathggnccngarggnmgngayggnccnccnggnytncarggnytnmgnggnaaraarggngayatgggnccnccnggnathccnggnytnytnggnytncarggnccnccnggnccnccnggngtnccnggnccnccnggnccnggnggnwsnccnggnytnccnggngarathggnttyccnggnaarccnggnccnccnggnccnacnggnccnccnggnaargayggnccnaayggnccnccnggnccnccnggnacnaarggngarccnggngarmgnggngargayggnytnccnggnaarccnggnytnmgnggngarathggngarcarggnytngcnggnmgnccnggngaraarggngargcnggnytnccnggngcnccnggnttyccnggngtnmgnggngaraarggngaycarggngaraarggngarytnggnytnccnggnytnaarggngaymgnggngaraarggngargcnggnccngcnggnccnccnggnytnccnggnacnacnwsnytnttyacnccncayccnmgnatgccnggngarcarggnccnaarggngaraarggngayccnggnytnccnggngarccnggnytncarggnmgnccnggngarytnggnccncarggnccnacnggnccnccnggngcnaarggncargarggngcncayggngcnccnggngcngcnggnaayccnggngcnccnggncaygtnggngcnccnggnccnwsnggnccnccnggnwsngtnggngcnccnggnytnmgnggnacnccnggnaargayggngarmgnggngaraarggngcngcnggngargarggnwsnccnggnccngtnggnccnmgnggngayccnggngcnccnggnytnccnggnccnccnggnaarggnaargayggngarccnggnytnmgnggnwsnccnggnytnccnggnccnytnggnacnaargcngcntgyggnaargtnmgnggnwsngaraaytgygcnytnggnggncartgygtnaarggngaymgnggngcnccnggnathccnggnwsnccnggnwsnmgnggngayccnggnathggngtngcnggnccnccnggnccnwsnggnccnccnggngayaarggnwsnccnggnwsnmgnggnytnccnggnttyccnggnccncarggnccngcnggnmgngayggngcnccnggnaayccnggngarmgnggnccnccnggnaarccnggnytnwsnwsnytnytnwsnccnggngayathaayytnytngcnaargaygtntgyaaygaytgyccnccnggnccnccnggnytnccnggnytnccnggnttyaarggngayaarggngtnccnggnaarccnggnmgngarggnacngarggnaaraarggngargcnggnccnccnggnytnccnggnccnccnggnathgcnggnccncarggnwsncarggngarmgnggngcngayggngargtnggncaraarggngaycarggncayccnggngtnccnggnttyatgggnccnccnggnaayccnggnccnccnggngcngayggnathgcnggngcngcnggnccnccnggnathcarggnwsnccnggnaargarggnccnccnggnccncarggnccnwsnggnytnccnggnathccnggngargarggnaargarggnmgngayggnaarccnggnccnccnggngarccnggnaargcnggngarccnggnytnccnggnccngarggngcnmgnggnccnccnggnttyaarggncayacnggngaywsnggngcnccnggnccnmgnggngarwsnggngcnatgggnytnccnggncargarggnytnccnggnaargayggngayacnggnccnacnggnccncarggnccncarggnccnmgnggnccnccnggnaaraayggnwsnccnggnwsnccnggngarccnggnccnwsnggnacnccnggncaraarggnwsnaarggngaraayggnwsnccnggnytnccnggnttyytnggnccnmgnggnccnccnggngarccnggngaraarggngtnccnggnaargarggngtnccnggnaarccnggngarccnggnttyaarggngarmgnggngayccnggnathaarggngayaarggnccnccnggnggnaarggncarccnggngayccnggnathccnggncayaarggncayacnggnytnatgggnccncarggnytnccnggngaraayggnccngtnggnccnccnggnccnccnggncarccnggnttyccnggnytnmgnggngarwsnccnwsnatggaracnytnmgnmgnytnathcargargarytnggnaarcarytngaracnmgnytngcntayytnytngcncaratgccnccngcntayatgaarwsnwsncarggnmgnccnggnccnccnggnccnccnggnaargayggnytnccnggnmgngcnggnccnatgggngarccnggnmgnccnggncarggnggnytngarggnccnwsnggnccnathggnccnaarggngarmgnggngcnaarggngayccnggngcnccnggngtnggnytnmgnggngaratgggnccnccnggnathccnggncarccnggngarccnggntaygcnaargayggnytnccnggnathccnggnccncarggngaracnggnccngcnggncayccnggnytnccnggnccnccnggnccnccnggncartgy

SEQ ID NO: 1138 - DNA, 1197 bp, Artificial Sequence
  hCol-CNA43 (alpha1(XXIII) THD)
  misc_feature (3)..(3): n is a, c, g, or t
  misc_feature (6)..(6): n is a, c, g, or t
  misc_feature (9)..(9): n is a, c, g, or t
  misc_feature (12)..(12): n is a, c, g, or t
  misc_feature (18)..(18): n is a, c, g, or t
  misc_feature (21)..(21): n is a, c, g, or t
  misc_feature (24)..(24): n is a, c, g, or t
  misc_feature (27)..(27): n is a, c, g, or t
  misc_feature (30)..(30): n is a, c, g, or t
  misc_feature (36)..(36): n is a, c, g, or t
  misc_feature (39)..(39): n is a, c, g, or t
  misc_feature (42)..(42): n is a, c, g, or t
  misc_feature (45)..(45): n is a, c, g, or t
  misc_feature (48)..(48): n is a, c, g, or t
  misc_feature (54)..(54): n is a, c, g, or t
  misc_feature (57)..(57): n is a, c, g, or t
  misc_feature (60)..(60): n is a, c, g, or t
  misc_feature (66)..(66): n is a, c, g, or t
  misc_feature (72)..(72): n is a, c, g, or t
  misc_feature (75)..(75): n is a, c, g, or t
  misc_feature (78)..(78): n is a, c, g, or t
  misc_feature (81)..(81): n is a, c, g, or t
  misc_feature (84)..(84): n is a, c, g, or t
  misc_feature (87)..(87): n is a, c, g, or t
  misc_feature (93)..(93): n is a, c, g, or t
  misc_feature (99)..(99): n is a, c, g, or t
  misc_feature (102)..(102): n is a, c, g, or t
  misc_feature (105)..(105): n is a, c, g, or t
  misc_feature (108)..(108): n is a, c, g, or t
  misc_feature (111)..(111): n is a, c, g, or t
  misc_feature (114)..(114): n is a, c, g, or t
  misc_feature (120)..(120): n is a, c, g, or t
  misc_feature (129)..(129): n is a, c, g, or t
  misc_feature (132)..(132): n is a, c, g, or t
  misc_feature (135)..(135): n is a, c, g, or t
  misc_feature (138)..(138): n is a, c, g, or t
  misc_feature (147)..(147): n is a, c, g, or t
  misc_feature (150)..(150): n is a, c, g, or t
  misc_feature (153)..(153): n is a, c, g, or t
  misc_feature (156)..(156): n is a, c, g, or t
  misc_feature (165)..(165): n is a, c, g, or t
  misc_feature (174)..(174): n is a, c, g, or t
  misc_feature (177)..(177): n is a, c, g, or t
  misc_feature (180)..(180): n is a, c, g, or t
  misc_feature (183)..(183): n is a, c, g, or t
  misc_feature (186)..(186): n is a, c, g, or t
  misc_feature (189)..(189): n is a, c, g, or t
  misc_feature (192)..(192): n is a, c, g, or t
  misc_feature (195)..(195): n is a, c, g, or t
  misc_feature (198)..(198): n is a, c, g, or t
  misc_feature (201)..(201): n is a, c, g, or t
  misc_feature (204)..(204): n is a, c, g, or t
  misc_feature (207)..(207): n is a, c, g, or t
  misc_feature (210)..(210): n is a, c, g, or t
  misc_feature (213)..(213): n is a, c, g, or t
  misc_feature (216)..(216): n is a, c, g, or t
  misc_feature (219)..(219): n is a, c, g, or t
  misc_feature (222)..(222): n is a, c, g, or t
  misc_feature (225)..(225): n is a, c, g, or t
  misc_feature (228)..(228): n is a, c, g, or t
  misc_feature (234)..(234): n is a, c, g, or t
  misc_feature (237)..(237): n is a, c, g, or t
  misc_feature (246)..(246): n is a, c, g, or t
  misc_feature (249)..(249): n is a, c, g, or t
  misc_feature (252)..(252): n is a, c, g, or t
  misc_feature (255)..(255): n is a, c, g, or t
  misc_feature (258)..(258): n is a, c, g, or t
  misc_feature (264)..(264): n is a, c, g, or t
  misc_feature (267)..(267): n is a, c, g, or t
  misc_feature (270)..(270): n is a, c, g, or t
  misc_feature (273)..(273): n is a, c, g, or t
  misc_feature (276)..(276): n is a, c, g, or t
  misc_feature (282)..(282): n is a, c, g, or t
  misc_feature (288)..(288): n is a, c, g, or t
  misc_feature (291)..(291): n is a, c, g, or t
  misc_feature (300)..(300): n is a, c, g, or t
  misc_feature (309)..(309): n is a, c, g, or t
  misc_feature (312)..(312): n is a, c, g, or t
  misc_feature (318)..(318): n is a, c, g, or t
  misc_feature (321)..(321): n is a, c, g, or t
  misc_feature (324)..(324): n is a, c, g, or t
  misc_feature (327)..(327): n is a, c, g, or t
  misc_feature (330)..(330): n is a, c, g, or t
  misc_feature (336)..(336): n is a, c, g, or t
  misc_feature (342)..(342): n is a, c, g, or t
  misc_feature (345)..(345): n is a, c, g, or t
  misc_feature (348)..(348): n is a, c, g, or t
  misc_feature (351)..(351): n is a, c, g, or t
  misc_feature (354)..(354): n is a, c, g, or t
  misc_feature (363)..(363): n is a, c, g, or t
  misc_feature (372)..(372): n is a, c, g, or t
  misc_feature (375)..(375): n is a, c, g, or t
  misc_feature (378)..(378): n is a, c, g, or t
  misc_feature (381)..(381): n is a, c, g, or t
  misc_feature (387)..(387): n is a, c, g, or t
  misc_feature (390)..(390): n is a, c, g, or t
  misc_feature (393)..(393): n is a, c, g, or t
  misc_feature (396)..(396): n is a, c, g, or t
  misc_feature (399)..(399): n is a, c, g, or t
  misc_feature (402)..(402): n is a, c, g, or t
  misc_feature (408)..(408): n is a, c, g, or t
  misc_feature (414)..(414): n is a, c, g, or t
  misc_feature (417)..(417): n is a, c, g, or t
  misc_feature (420)..(420): n is a, c, g, or t
  misc_feature (426)..(426): n is a, c, g, or t
  misc_feature (429)..(429): n is a, c, g, or t
  misc_feature (432)..(432): n is a, c, g, or t
  misc_feature (435)..(435): n is a, c, g, or t
  misc_feature (444)..(444): n is a, c, g, or t
  misc_feature (447)..(447): n is a, c, g, or t
  misc_feature (453)..(453): n is a, c, g, or t
  misc_feature (456)..(456): n is a, c, g, or t
  misc_feature (459)..(459): n is a, c, g, or t
  misc_feature (462)..(462): n is a, c, g, or t
  misc_feature (465)..(465): n is a, c, g, or t
  misc_feature (471)..(471): n is a, c, g, or t
  misc_feature (477)..(477): n is a, c, g, or t
  misc_feature (480)..(480): n is a, c, g, or t
  misc_feature (486)..(486): n is a, c, g, or t
  misc_feature (489)..(489): n is a, c, g, or t
  misc_feature (492)..(492): n is a, c, g, or t
  misc_feature (498)..(498): n is a, c, g, or t
  misc_feature (501)..(501): n is a, c, g, or t
  misc_feature (504)..(504): n is a, c, g, or t
  misc_feature (507)..(507): n is a, c, g, or t
  misc_feature (510)..(510): n is a, c, g, or t
  misc_feature (513)..(513): n is a, c, g, or t
  misc_feature (516)..(516): n is a, c, g, or t
  misc_feature (519)..(519): n is a, c, g, or t
  misc_feature (522)..(522): n is a, c, g, or t
  misc_feature (525)..(525): n is a, c, g, or t
  misc_feature (528)..(528): n is a, c, g, or t
  misc_feature (534)..(534): n is a, c, g, or t
  misc_feature (543)..(543): n is a, c, g, or t
  misc_feature (549)..(549): n is a, c, g, or t
  misc_feature (552)..(552): n is a, c, g, or t
  misc_feature (555)..(555): n is a, c, g, or t
  misc_feature (570)..(570): n is a, c, g, or t
  misc_feature (573)..(573): n is a, c, g, or t
  misc_feature (579)..(579): n is a, c, g, or t
  misc_feature (585)..(585): n is a, c, g, or t
  misc_feature (588)..(588): n is a, c, g, or t
  misc_feature (594)..(594): n is a, c, g, or t
  misc_feature (597)..(597): n is a, c, g, or t
  misc_feature (600)..(600): n is a, c, g, or t
  misc_feature (603)..(603): n is a, c, g, or t
  misc_feature (606)..(606): n is a, c, g, or t
  misc_feature (612)..(612): n is a, c, g, or t
  misc_feature (615)..(615): n is a, c, g, or t
  misc_feature (618)..(618): n is a, c, g, or t
  misc_feature (621)..(621): n is a, c, g, or t
  misc_feature (624)..(624): n is a, c, g, or t
  misc_feature (627)..(627): n is a, c, g, or t
  misc_feature (630)..(630): n is a, c, g, or t
  misc_feature (636)..(636): n is a, c, g, or t
  misc_feature (639)..(639): n is a, c, g, or t
  misc_feature (642)..(642): n is a, c, g, or t
  misc_feature (648)..(648): n is a, c, g, or t
  misc_feature (654)..(654): n is a, c, g, or t
  misc_feature (657)..(657): n is a, c, g, or t
  misc_feature (660)..(660): n is a, c, g, or t
  misc_feature (663)..(663): n is a, c, g, or t
  misc_feature (666)..(666): n is a, c, g, or t
  misc_feature (669)..(669): n is a, c, g, or t
  misc_feature (672)..(672): n is a, c, g, or t
  misc_feature (675)..(675): n is a, c, g, or t
  misc_feature (684)..(684): n is a, c, g, or t
  misc_feature (693)..(693): n is a, c, g, or t
  misc_feature (696)..(696): n is a, c, g, or t
  misc_feature (702)..(702): n is a, c, g, or t
  misc_feature (711)..(711): n is a, c, g, or t
  misc_feature (717)..(717): n is a, c, g, or t
  misc_feature (720)..(720): n is a, c, g, or t
  misc_feature (726)..(726): n is a, c, g, or t
  misc_feature (729)..(729): n is a, c, g, or t
  misc_feature (732)..(732): n is a, c, g, or t
  misc_feature (735)..(735): n is a, c, g, or t
  misc_feature (738)..(738): n is a, c, g, or t
  misc_feature (741)..(741): n is a, c, g, or t
  misc_feature (747)..(747): n is a, c, g, or t
  misc_feature (753)..(753): n is a, c, g, or t
  misc_feature (756)..(756): n is a, c, g, or t
  misc_feature (765)..(765): n is a, c, g, or t
  misc_feature (768)..(768): n is a, c, g, or t
  misc_feature (771)..(771): n is a, c, g, or t
  misc_feature (774)..(774): n is a, c, g, or t
  misc_feature (777)..(777): n is a, c, g, or t
  misc_feature (780)..(780): n is a, c, g, or t
  misc_feature (783)..(783): n is a, c, g, or t
  misc_feature (786)..(786): n is a, c, g, or t
  misc_feature (792)..(792): n is a, c, g, or t
  misc_feature (795)..(795): n is a, c, g, or t
  misc_feature (801)..(801): n is a, c, g, or t
  misc_feature (810)..(810): n is a, c, g, or t
  misc_feature (816)..(816): n is a, c, g, or t
  misc_feature (819)..(819): n is a, c, g, or t
  misc_feature (822)..(822): n is a, c, g, or t
  misc_feature (828)..(828): n is a, c, g, or t
  misc_feature (831)..(831): n is a, c, g, or t
  misc_feature (840)..(840): n is a, c, g, or t
  misc_feature (843)..(843): n is a, c, g, or t
  misc_feature (846)..(846): n is a, c, g, or t
  misc_feature (852)..(852): n is a, c, g, or t
  misc_feature (858)..(858): n is a, c, g, or t
  misc_feature (864)..(864): n is a, c, g, or t
  misc_feature (867)..(867): n is a, c, g, or t
  misc_feature (870)..(870): n is a, c, g, or t
  misc_feature (873)..(873): n is a, c, g, or t
  misc_feature (876)..(876): n is a, c, g, or t
  misc_feature (879)..(879): n is a, c, g, or t
  misc_feature (882)..(882): n is a, c, g, or t
  misc_feature (885)..(885): n is a, c, g, or t
  misc_feature (888)..(888): n is a, c, g, or t
  misc_feature (891)..(891): n is a, c, g, or t
  misc_feature (894)..(894): n is a, c, g, or t
  misc_feature (897)..(897): n is a, c, g, or t
  misc_feature (903)..(903): n is a, c, g, or t
  misc_feature (906)..(906): n is a, c, g, or t
  misc_feature (912)..(912): n is a, c, g, or t
  misc_feature (921)..(921): n is a, c, g, or t
  misc_feature (924)..(924): n is a, c, g, or t
  misc_feature (930)..(930): n is a, c, g, or t
  misc_feature (933)..(933): n is a, c, g, or t
  misc_feature (939)..(939): n is a, c, g, or t
  misc_feature (942)..(942): n is a, c, g, or t
  misc_feature (948)..(948): n is a, c, g, or t
  misc_feature (957)..(957): n is a, c, g, or t
  misc_feature (960)..(960): n is a, c, g, or t
  misc_feature (963)..(963): n is a, c, g, or t
  misc_feature (966)..(966): n is a, c, g, or t
  misc_feature (972)..(972): n is a, c, g, or t
  misc_feature (975)..(975): n is a, c, g, or t
  misc_feature (978)..(978): n is a, c, g, or t
  misc_feature (981)..(981): n is a, c, g, or t
  misc_feature (984)..(984): n is a, c, g, or t
  misc_feature (987)..(987): n is a, c, g, or t
  misc_feature (990)..(990): n is a, c, g, or t
  misc_feature (993)..(993): n is a, c, g, or t
  misc_feature (996)..(996): n is a, c, g, or t
  misc_feature (999)..(999): n is a, c, g, or t
  misc_feature (1002)..(1002): n is a, c, g, or t
  misc_feature (1005)..(1005): n is a, c, g, or t
  misc_feature (1008)..(1008): n is a, c, g, or t
  misc_feature (1011)..(1011): n is a, c, g, or t
  misc_feature (1014)..(1014): n is a, c, g, or t
  misc_feature (1020)..(1020): n is a, c, g, or t
  misc_feature (1023)..(1023): n is a, c, g, or t
  misc_feature (1026)..(1026): n is a, c, g, or t
  misc_feature (1029)..(1029): n is a, c, g, or t
  misc_feature (1032)..(1032): n is a, c, g, or t
  misc_feature (1038)..(1038): n is a, c, g, or t
  misc_feature (1047)..(1047): n is a, c, g, or t
  misc_feature (1050)..(1050): n is a, c, g, or t
  misc_feature (1053)..(1053): n is a, c, g, or t
  misc_feature (1056)..(1056): n is a, c, g, or t
  misc_feature (1062)..(1062): n is a, c, g, or t
  misc_feature (1065)..(1065): n is a, c, g, or t
  misc_feature (1068)..(1068): n is a, c, g, or t
  misc_feature (1074)..(1074): n is a, c, g, or t
  misc_feature (1080)..(1080): n is a, c, g, or t
  misc_feature (1083)..(1083): n is a, c, g, or t
  misc_feature (1086)..(1086): n is a, c, g, or t
  misc_feature (1089)..(1089): n is a, c, g, or t
  misc_feature (1092)..(1092): n is a, c, g, or t
  misc_feature (1101)..(1101): n is a, c, g, or t
  misc_feature (1107)..(1107): n is a, c, g, or t
  misc_feature (1110)..(1110): n is a, c, g, or t
  misc_feature (1116)..(1116): n is a, c, g, or t
  misc_feature (1119)..(1119): n is a, c, g, or t
  misc_feature (1128)..(1128): n is a, c, g, or t
  misc_feature (1134)..(1134): n is a, c, g, or t
  misc_feature (1137)..(1137): n is a, c, g, or t
  misc_feature (1140)..(1140): n is a, c, g, or t
  misc_feature (1143)..(1143): n is a, c, g, or t
  misc_feature (1146)..(1146): n is a, c, g, or t
  misc_feature (1149)..(1149): n is a, c, g, or t
  misc_feature (1155)..(1155): n is a, c, g, or t
  misc_feature (1158)..(1158): n is a, c, g, or t
  misc_feature (1164)..(1164): n is a, c, g, or t
  misc_feature (1173)..(1173): n is a, c, g, or t
  misc_feature (1179)..(1179): n is a, c, g, or t
  misc_feature (1182)..(1182): n is a, c, g, or t
  misc_feature (1185)..(1185): n is a, c, g, or t
  misc_feature (1188)..(1188): n is a, c, g, or t
  misc_feature (1191)..(1191): n is a, c, g, or t
  misc_feature (1194)..(1194): n is a, c, g, or t
ggnmgnmgnggnaarccnggnmgnmgnggngayccnggnccnccnggncarwsnggnmgngayggntayccnggnccnytnggnytngayggnaarccnggnytnccnggnccnaarggngaraarggngcnccnggngayttyggnccnmgnggngaycarggncargayggngcngcnggnccnccnggnccnccnggnccnccnggngcnmgnggnccnccnggngayacnggnaargayggnccnmgnggngcncarggnccngcnggnccnaarggngarccnggncargayggngaratgggnccnaarggnccnccnggnccnaarggngarccnggngtnccnggnaaraarggngaygayggnacnccnwsncarccnggnccnccnggnccnaarggngarccnggnwsnatgggnccnmgnggngaraayggngtngayggngcnccnggnccnaarggngarccnggncaymgnggnacngayggngcngcnggnccnmgnggngcnccnggnytnaarggngarcarggngayacngtngtnathgaytaygayggnmgnathytngaygcnytnaarggnccnccnggnccncarggnccnccnggnccnccnggnathccnggngcnaarggngarytnggnytnccnggngcnccnggnathgayggngaraarggnccnaarggncaraarggngayccnggngarccnggnccngcnggnytnaarggngargcnggngaratgggnytnwsnggnytnccnggngcngayggnytnaarggngaraarggngarwsngcnwsngaywsnytncargarwsnytngcncarytnathgtngarccnggnccnccnggnccnccnggnccnccnggnccnatgggnytncarggnathcarggnccnaarggnytngayggngcnaarggngaraarggngcnwsnggngarmgnggnccnwsnggnytnccnggnccngtnggnccnccnggnytnathggnytnccnggnacnaarggngaraarggnmgnccnggngarccnggnytngayggnttyccnggnccnmgnggngaraarggngaymgnwsngarmgnggngaraarggngarmgnggngtnccnggnmgnaarggngtnaarggncaraarggngarccnggnccnccnggnytngay

SEQ ID NO: 1139 - DNA, 2973 bp, Artificial Sequence
  hCol-CNA44 (alpha1(XXIV) THD)
  misc_feature (3)..(3): n is a, c, g, or t
  misc_feature (6)..(6): n is a, c, g, or t
  misc_feature (12)..(12): n is a, c, g, or t
  misc_feature (18)..(18): n is a, c, g, or t
  misc_feature (21)..(21): n is a, c, g, or t
  misc_feature (24)..(24): n is a, c, g, or t
  misc_feature (27)..(27): n is a, c, g, or t
  misc_feature (30)..(30): n is a, c, g, or t
  misc_feature (33)..(33): n is a, c, g, or t
  misc_feature (36)..(36): n is a, c, g, or t
  misc_feature (39)..(39): n is a, c, g, or t
  misc_feature (42)..(42): n is a, c, g, or t
  misc_feature (45)..(45): n is a, c, g, or t
  misc_feature (48)..(48): n is a, c, g, or t
  misc_feature (54)..(54): n is a, c, g, or t
  misc_feature (57)..(57): n is a, c, g, or t
  misc_feature (60)..(60): n is a, c, g, or t
  misc_feature (63)..(63): n is a, c, g, or t
  misc_feature (66)..(66): n is a, c, g, or t
  misc_feature (72)..(72): n is a, c, g, or t
  misc_feature (75)..(75): n is a, c, g, or t
  misc_feature (78)..(78): n is a, c, g, or t
  misc_feature (81)..(81): n is a, c, g, or t
  misc_feature (84)..(84): n is a, c, g, or t
  misc_feature (90)..(90): n is a, c, g, or t
  misc_feature (93)..(93): n is a, c, g, or t
  misc_feature (96)..(96): n is a, c, g, or t
  misc_feature (102)..(102): n is a, c, g, or t
  misc_feature (108)..(108): n is a, c, g, or t
  misc_feature (111)..(111): n is a, c, g, or t
  misc_feature (114)..(114): n is a, c, g, or t
  misc_feature (117)..(117): n is a, c, g, or t
  misc_feature (120)..(120): n is a, c, g, or t
  misc_feature (123)..(123): n is a, c, g, or t
  misc_feature (126)..(126): n is a, c, g, or t
  misc_feature (129)..(129): n is a, c, g, or t
  misc_feature (132)..(132): n is a, c, g, or t
  misc_feature (138)..(138): n is a, c, g, or t
  misc_feature (141)..(141): n is a, c, g, or t
  misc_feature (147)..(147): n is a, c, g, or t
  misc_feature (153)..(153): n is a, c, g, or t
  misc_feature (156)..(156): n is a, c, g, or t
  misc_feature (162)..(162): n is a, c, g, or t
  misc_feature (165)..(165): n is a, c, g, or t
  misc_feature (168)..(168): n is a, c, g, or t
  misc_feature (174)..(174): n is a, c, g, or t
  misc_feature (177)..(177): n is a, c, g, or t
  misc_feature (180)..(180): n is a, c, g, or t
  misc_feature (183)..(183): n is a, c, g, or t
  misc_feature (192)..(192): n is a, c, g, or t
  misc_feature (201)..(201): n is a, c, g, or t
  misc_feature (204)..(204): n is a, c, g, or t
  misc_feature (207)..(207): n is a, c, g, or t
  misc_feature (210)..(210): n is a, c, g, or t
  misc_feature (213)..(213): n is a, c, g, or t
  misc_feature (219)..(219): n is a, c, g, or t
  misc_feature (222)..(222): n is a, c, g, or t
  misc_feature (225)..(225): n is a, c, g, or t
  misc_feature (228)..(228): n is a, c, g, or t
  misc_feature (237)..(237): n is a, c, g, or t
  misc_feature (246)..(246): n is a, c, g, or t
  misc_feature (249)..(249): n is a, c, g, or t
  misc_feature (255)..(255): n is a, c, g, or t
  misc_feature (261)..(261): n is a, c, g, or t
  misc_feature (264)..(264): n is a, c, g, or t
  misc_feature (267)..(267): n is a, c, g, or t
  misc_feature (270)..(270): n is a, c, g, or t
  misc_feature (273)..(273): n is a, c, g, or t
  misc_feature (276)..(276): n is a, c, g, or t
  misc_feature (279)..(279): n is a, c, g, or t
  misc_feature (282)..(282): n is a, c, g, or t
  misc_feature (291)..(291): n is a, c, g, or t
  misc_feature (297)..(297): n is a, c, g, or t
  misc_feature (300)..(300): n is a, c, g, or t
  misc_feature (306)..(306): n is a, c, g, or t
  misc_feature (309)..(309): n is a, c, g, or t
  misc_feature (318)..(318): n is a, c, g, or t
  misc_feature (321)..(321): n is a, c, g, or t
  misc_feature (324)..(324): n is a, c, g, or t
  misc_feature (327)..(327): n is a, c, g, or t
  misc_feature (333)..(333): n is a, c, g, or t
  misc_feature (336)..(336): n is a, c, g, or t
  misc_feature (339)..(339): n is a, c, g, or t
  misc_feature (345)..(345): n is a, c, g, or t
  misc_feature (348)..(348): n is a, c, g, or t
  misc_feature (351)..(351): n is a, c, g, or t
  misc_feature (354)..(354): n is a, c, g, or t
  misc_feature (357)..(357): n is a, c, g, or t
  misc_feature (363)..(363): n is a, c, g, or t
  misc_feature (369)..(369): n is a, c, g, or t
  misc_feature (372)..(372): n is a, c, g, or t
  misc_feature (375)..(375): n is a, c, g, or t
  misc_feature (381)..(381): n is a, c, g, or t
  misc_feature (384)..(384): n is a, c, g, or t
  misc_feature (390)..(390): n is a, c, g, or t
  misc_feature (399)..(399): n is a, c, g, or t
  misc_feature (402)..(402): n is a, c, g, or t
  misc_feature (405)..(405): n is a, c, g, or t
  misc_feature (408)..(408): n is a, c, g, or t
  misc_feature (414)..(414): n is a, c, g, or t
  misc_feature (417)..(417): n is a, c, g, or t
  misc_feature (423)..(423): n is a, c, g, or t
  misc_feature (426)..(426): n is a, c, g, or t
  misc_feature (429)..(429): n is a, c, g, or t
  misc_feature (435)..(435): n is a, c, g, or t
  misc_feature (441)..(441): n is a, c, g, or t
  misc_feature (444)..(444): n is a, c, g, or t
  misc_feature (450)..(450): n is a, c, g, or t
  misc_feature (453)..(453): n is a, c, g, or t
  misc_feature (459)..(459): n is a, c, g, or t
  misc_feature (462)..(462): n is a, c, g, or t
  misc_feature (471)..(471): n is a, c, g, or t
  misc_feature (480)..(480): n is a, c, g, or t
  misc_feature (483)..(483): n is a, c, g, or t
  misc_feature (489)..(489): n is a, c, g, or t
  misc_feature (495)..(495): n is a, c, g, or t
  misc_feature (498)..(498): n is a, c, g, or t
  misc_feature (507)..(507): n is a, c, g, or t
  misc_feature (513)..(513): n is a, c, g, or t
  misc_feature (516)..(516): n is a, c, g, or t
  misc_feature (519)..(519): n is a, c, g, or t
  misc_feature (522)..(522): n is a, c, g, or t
  misc_feature (525)..(525): n is a, c, g, or t
  misc_feature (528)..(528): n is a, c, g, or t
  misc_feature (534)..(534): n is a, c, g, or t
  misc_feature (537)..(537): n is a, c, g, or t
  misc_feature (540)..(540): n is a, c, g, or t
  misc_feature (543)..(543): n is a, c, g, or t
  misc_feature (546)..(546): n is a, c, g, or t
  misc_feature (549)..(549): n is a, c, g, or t
  misc_feature (552)..(552): n is a, c, g, or t
  misc_feature (555)..(555): n is a, c, g, or t
  misc_feature (558)..(558): n is a, c, g, or t
  misc_feature (561)..(561): n is a, c, g, or t
  misc_feature (564)..(564): n is a, c, g, or t
  misc_feature (567)..(567): n is a, c, g, or t
  misc_feature (570)..(570): n is a, c, g, or t
  misc_feature (576)..(576): n is a, c, g, or t
  misc_feature (579)..(579): n is a, c, g, or t
  misc_feature (582)..(582): n is a, c, g, or t
  misc_feature (585)..(585): n is a, c, g, or t
  misc_feature (588)..(588): n is a, c, g, or t
  misc_feature (591)..(591): n is a, c, g, or t
  misc_feature (594)..(594): n is a, c, g, or t
  misc_feature (597)..(597): n is a, c, g, or t
  misc_feature (600)..(600): n is a, c, g, or t
  misc_feature (603)..(603): n is a, c, g, or t
  misc_feature (606)..(606): n is a, c, g, or t
  misc_feature (609)..(609): n is a, c, g, or t
  misc_feature (615)..(615): n is a, c, g, or t
  misc_feature (618)..(618): n is a, c, g, or t
  misc_feature (621)..(621): n is a, c, g, or t
  misc_feature (624)..(624): n is a, c, g, or t
  misc_feature (630)..(630): n is a, c, g, or t
  misc_feature (633)..(633): n is a, c, g, or t
  misc_feature (636)..(636): n is a, c, g, or t
  misc_feature (642)..(642): n is a, c, g, or t
  misc_feature (645)..(645): n is a, c, g, or t
  misc_feature (648)..(648): n is a, c, g, or t
  misc_feature (651)..(651): n is a, c, g, or t
  misc_feature (660)..(660): n is a, c, g, or t
  misc_feature (663)..(663): n is a, c, g, or t
  misc_feature (666)..(666): n is a, c, g, or t
  misc_feature (669)..(669): n is a, c, g, or t
  misc_feature (678)..(678): n is a, c, g, or t
  misc_feature (687)..(687): n is a, c, g, or t
  misc_feature (696)..(696): n is a, c, g, or t
  misc_feature (699)..(699): n is a, c, g, or t
  misc_feature (702)..(702): n is a, c, g, or t
  misc_feature (705)..(705): n is a, c, g, or t
  misc_feature (711)..(711): n is a, c, g, or t
  misc_feature (714)..(714): n is a, c, g, or t
  misc_feature (720)..(720): n is a, c, g, or t
  misc_feature (723)..(723): n is a, c, g, or t
  misc_feature (729)..(729): n is a, c, g, or t
  misc_feature (732)..(732): n is a, c, g, or t
  misc_feature (741)..(741): n is a, c, g, or t
  misc_feature (744)..(744): n is a, c, g, or t
  misc_feature (747)..(747): n is a, c, g, or t
  misc_feature (750)..(750): n is a, c, g, or t
  misc_feature (753)..(753): n is a, c, g, or t
  misc_feature (756)..(756): n is a, c, g, or t
  misc_feature (759)..(759): n is a, c, g, or t
  misc_feature (762)..(762): n is a, c, g, or t
  misc_feature (765)..(765): n is a, c, g, or t
  misc_feature (768)..(768): n is a, c, g, or t
  misc_feature (774)..(774): n is a, c, g, or t
  misc_feature (777)..(777): n is a, c, g, or t
  misc_feature (783)..(783): n is a, c, g, or t
  misc_feature (786)..(786): n is a, c, g, or t
  misc_feature (789)..(789): n is a, c, g, or t
  misc_feature (792)..(792): n is a, c, g, or t
  misc_feature (795)..(795): n is a, c, g, or t
  misc_feature (801)..(801): n is a, c, g, or t
  misc_feature (804)..(804): n is a, c, g, or t
  misc_feature (810)..(810): n is a, c, g, or t
  misc_feature (813)..(813): n is a, c, g, or t
  misc_feature (816)..(816): n is a, c, g, or t
  misc_feature (822)..(822): n is a, c, g, or t
  misc_feature (825)..(825): n is a, c, g, or t
  misc_feature (828)..(828): n is a, c, g, or t
  misc_feature (831)..(831): n is a, c, g, or t
  misc_feature (834)..(834): n is a, c, g, or t
  misc_feature (837)..(837): n is a, c, g, or t
  misc_feature (840)..(840): n is a, c, g, or t
  misc_feature (843)..(843): n is a, c, g, or t
  misc_feature (849)..(849): n is a, c, g, or t
  misc_feature (855)..(855): n is a, c, g, or t
  misc_feature (858)..(858): n is a, c, g, or t
  misc_feature (867)..(867): n is a, c, g, or t
  misc_feature (873)..(873): n is a, c, g, or t
  misc_feature (876)..(876): n is a, c, g, or t
  misc_feature (885)..(885): n is a, c, g, or t
  misc_feature (888)..(888): n is a, c, g, or t
  misc_feature (894)..(894): n is a, c, g, or t
  misc_feature (897)..(897): n is a, c, g, or t
  misc_feature (903)..(903): n is a, c, g, or t
  misc_feature (906)..(906): n is a, c, g, or t
  misc_feature (909)..(909): n is a, c, g, or t
  misc_feature (912)..(912): n is a, c, g, or t
  misc_feature (918)..(918): n is a, c, g, or t
  misc_feature (921)..(921): n is a, c, g, or t
  misc_feature (924)..(924): n is a, c, g, or t
  misc_feature (927)..(927): n is a, c, g, or t
  misc_feature (930)..(930): n is a, c, g, or t
  misc_feature (933)..(933): n is a, c, g, or t
  misc_feature (936)..(936): n is a, c, g, or t
  misc_feature (939)..(939): n is a, c, g, or t
  misc_feature (942)..(942): n is a, c, g, or t
  misc_feature (948)..(948): n is a, c, g, or t
  misc_feature (951)..(951): n is a, c, g, or t
  misc_feature (957)..(957): n is a, c, g, or t
  misc_feature (966)..(966): n is a, c, g, or t
  misc_feature (969)..(969): n is a, c, g, or t
  misc_feature (975)..(975): n is a, c, g, or t
  misc_feature (978)..(978): n is a, c, g, or t
  misc_feature (984)..(984): n is a, c, g, or t
  misc_feature (990)..(990): n is a, c, g, or t
  misc_feature (993)..(993): n is a, c, g, or t
  misc_feature (996)..(996): n is a, c, g, or t
  misc_feature (999)..(999): n is a, c, g, or t
  misc_feature (1002)..(1002): n is a, c, g, or t
  misc_feature (1008)..(1008): n is a, c, g, or t
  misc_feature (1011)..(1011): n is a, c, g, or t
  misc_feature (1020)..(1020): n is a, c, g, or t
  misc_feature (1026)..(1026): n is a, c, g, or t
  misc_feature (1029)..(1029): n is a, c, g, or t
  misc_feature (1035)..(1035): n is a, c, g, or t
  misc_feature (1038)..(1038): n is a, c, g, or t
  misc_feature (1041)..(1041): n is a, c, g, or t
  misc_feature (1047)..(1047): n is a, c, g, or t
  misc_feature (1050)..(1050): n is a, c, g, or t
  misc_feature (1056)..(1056): n is a, c, g, or t
  misc_feature (1062)..(1062): n is a, c, g, or t
  misc_feature (1065)..(1065): n is a, c, g, or t
  misc_feature (1074)..(1074): n is a, c, g, or t
  misc_feature (1083)..(1083): n is a, c, g, or t
  misc_feature (1092)..(1092): n is a, c, g, or t
  misc_feature (1098)..(1098): n is a, c, g, or t
  misc_feature (1101)..(1101): n is a, c, g, or t
  misc_feature (1104)..(1104): n is a, c, g, or t
  misc_feature (1107)..(1107): n is a, c, g, or t
  misc_feature (1110)..(1110): n is a, c, g, or t
  misc_feature (1113)..(1113): n is a, c, g, or t
  misc_feature (1116)..(1116): n is a, c, g, or t
  misc_feature (1119)..(1119): n is a, c, g, or t
  misc_feature (1125)..(1125): n is a, c, g, or t
  misc_feature (1128)..(1128): n is a, c, g, or t
  misc_feature (1134)..(1134): n is a, c, g, or t
  misc_feature (1137)..(1137): n is a, c, g, or t
  misc_feature (1140)..(1140): n is a, c, g, or t
  misc_feature (1146)..(1146): n is a, c, g, or t
  misc_feature (1155)..(1155): n is a, c, g, or t
  misc_feature (1161)..(1161): n is a, c, g, or t
  misc_feature (1164)..(1164): n is a, c, g, or t
  misc_feature (1167)..(1167): n is a, c, g, or t
  misc_feature (1170)..(1170): n is a, c, g, or t
  misc_feature (1173)..(1173): n is a, c, g, or t
  misc_feature (1176)..(1176): n is a, c, g, or t
  misc_feature (1179)..(1179): n is a, c, g, or t
  misc_feature (1182)..(1182): n is a, c, g, or t
  misc_feature (1185)..(1185): n is a, c, g, or t
  misc_feature (1191)..(1191): n is a, c, g, or t
  misc_feature (1200)..(1200): n is a, c, g, or t
  misc_feature (1203)..(1203): n is a, c, g, or t
  misc_feature (1209)..(1209): n is a, c, g, or t
  misc_feature (1215)..(1215): n is a, c, g, or t
  misc_feature (1218)..(1218): n is a, c, g, or t
  misc_feature (1221)..(1221): n is a, c, g, or t
  misc_feature (1224)..(1224): n is a, c, g, or t
  misc_feature (1227)..(1227): n is a, c, g, or t
  misc_feature (1230)..(1230): n is a, c, g, or t
  misc_feature (1233)..(1233): n is a, c, g, or t
  misc_feature (1236)..(1236): n is a, c, g, or t
  misc_feature (1239)..(1239): n is a, c, g, or t
  misc_feature (1245)..(1245): n is a, c, g, or t
  misc_feature (1248)..(1248): n is a, c, g, or t
  misc_feature (1251)..(1251): n is a, c, g, or t
  misc_feature (1254)..(1254): n is a, c, g, or t
  misc_feature (1257)..(1257): n is a, c, g, or t
  misc_feature (1260)..(1260): n is a, c, g, or t
  misc_feature (1263)..(1263): n is a, c, g, or t
  misc_feature (1269)..(1269): n is a, c, g, or t
  misc_feature (1272)..(1272): n is a, c, g, or t
  misc_feature (1275)..(1275): n is a, c, g, or t
  misc_feature (1278)..(1278): n is a, c, g, or t
  misc_feature (1281)..(1281): n is a, c, g, or t
  misc_feature (1284)..(1284): n is a, c, g, or t
  misc_feature (1287)..(1287): n is a, c, g, or t
  misc_feature (1290)..(1290): n is a, c, g, or t
  misc_feature (1293)..(1293): n is a, c, g, or t
  misc_feature (1299)..(1299): n is a, c, g, or t
  misc_feature (1302)..(1302): n is a, c, g, or t
  misc_feature (1308)..(1308): n is a, c, g, or t
  misc_feature (1314)..(1314): n is a, c, g, or t
  misc_feature (1317)..(1317): n is a, c, g, or t
  misc_feature (1320)..(1320): n is a, c, g, or t
  misc_feature (1323)..(1323): n is a, c, g, or t
  misc_feature (1326)..(1326): n is a, c, g, or t
  misc_feature (1329)..(1329): n is a, c, g, or t
  misc_feature (1335)..(1335): n is a, c, g, or t
  misc_feature (1338)..(1338): n is a, c, g, or t
  misc_feature (1341)..(1341): n is a, c, g, or t
  misc_feature (1344)..(1344): n is a, c, g, or t
  misc_feature (1353)..(1353): n is a, c, g, or t
  misc_feature (1362)..(1362): n is a, c, g, or t
  misc_feature (1365)..(1365): n is a, c, g, or t
  misc_feature (1371)..(1371): n is a, c, g, or t
  misc_feature (1380)..(1380): n is a, c, g, or t
  misc_feature (1389)..(1389): n is a, c, g, or t
  misc_feature (1395)..(1395): n is a, c, g, or t
  misc_feature (1398)..(1398): n is a, c, g, or t
  misc_feature (1401)..(1401): n is a, c, g, or t
  misc_feature (1407)..(1407): n is a, c, g, or t
  misc_feature (1410)..(1410): n is a, c, g, or t
  misc_feature (1416)..(1416): n is a, c, g, or t
  misc_feature (1422)..(1422): n is a, c, g, or t
  misc_feature (1425)..(1425): n is a, c, g, or t
  misc_feature (1431)..(1431): n is a, c, g, or t
  misc_feature (1434)..(1434): n is a, c, g, or t
  misc_feature (1440)..(1440): n is a, c, g, or t
  misc_feature (1443)..(1443): n is a, c, g, or t
  misc_feature (1452)..(1452): n is a, c, g, or t
  misc_feature (1458)..(1458): n is a, c, g, or t
  misc_feature (1461)..(1461): n is a, c, g, or t
  misc_feature (1464)..(1464): n is a, c, g, or t
  misc_feature (1470)..(1470): n is a, c, g, or t
  misc_feature (1473)..(1473): n is a, c, g, or t
  misc_feature (1476)..(1476): n is a, c, g, or t
  misc_feature (1479)..(1479): n is a, c, g, or t
  misc_feature (1482)..(1482): n is a, c, g, or t
  misc_feature (1485)..(1485): n is a, c, g, or t
  misc_feature (1488)..(1488): n is a, c, g, or t
  misc_feature (1494)..(1494): n is a, c, g, or t
  misc_feature (1497)..(1497): n is a, c, g, or t
  misc_feature (1500)..(1500): n is a, c, g, or t
  misc_feature (1503)..(1503): n is a, c, g, or t
  misc_feature (1506)..(1506): n is a, c, g, or t
  misc_feature (1512)..(1512): n is a, c, g, or t
  misc_feature (1515)..(1515): n is a, c, g, or t
  misc_feature (1518)..(1518): n is a, c, g, or t
  misc_feature (1521)..(1521): n is a, c, g, or t
  misc_feature (1524)..(1524): n is a, c, g, or t
  misc_feature (1527)..(1527): n is a, c, g, or t
  misc_feature (1533)..(1533): n is a, c, g, or t
  misc_feature (1539)..(1539): n is a, c, g, or t
  misc_feature (1542)..(1542): n is a, c, g, or t
  misc_feature (1545)..(1545): n is a, c, g, or t
  misc_feature (1548)..(1548): n is a, c, g, or t
  misc_feature (1551)..(1551): n is a, c, g, or t
  misc_feature (1560)..(1560): n is a, c, g, or t
  misc_feature (1569)..(1569): n is a, c, g, or t
  misc_feature (1572)..(1572): n is a, c, g, or t
  misc_feature (1575)..(1575): n is a, c, g, or t
  misc_feature (1578)..(1578): n is a, c, g, or t
  misc_feature (1581)..(1581): n is a, c, g, or t
  misc_feature (1587)..(1587): n is a, c, g, or t
  misc_feature (1593)..(1593): n is a, c, g, or t
  misc_feature (1596)..(1596): n is a, c, g, or t
  misc_feature (1599)..(1599): n is a, c, g, or t
  misc_feature (1605)..(1605): n is a, c, g, or t
  misc_feature (1611)..(1611): n is a, c, g, or t
  misc_feature (1614)..(1614): n is a, c, g, or t
  misc_feature (1617)..(1617): n is a, c, g, or t
  misc_feature (1623)..(1623): n is a, c, g, or t
  misc_feature (1629)..(1629): n is a, c, g, or t
  misc_feature (1632)..(1632): n is a, c, g, or t
  misc_feature (1635)..(1635): n is a, c, g, or t
  misc_feature (1638)..(1638): n is a, c, g, or t
  misc_feature (1641)..(1641): n is a, c, g, or t
  misc_feature (1644)..(1644): n is a, c, g, or t
  misc_feature (1647)..(1647): n is a, c, g, or t
  misc_feature (1650)..(1650): n is a, c, g, or t
  misc_feature (1653)..(1653): n is a, c, g, or t
  misc_feature (1656)..(1656): n is a, c, g, or t
  misc_feature (1659)..(1659): n is a, c, g, or t
  misc_feature (1665)..(1665): n is a, c, g, or t
  misc_feature (1668)..(1668): n is a, c, g, or t
  misc_feature (1671)..(1671): n is a, c, g, or t
  misc_feature (1674)..(1674): n is a, c, g, or t
  misc_feature (1677)..(1677): n is a, c, g, or t
  misc_feature (1683)..(1683): n is a, c, g, or t
  misc_feature (1686)..(1686): n is a, c, g, or t
  misc_feature (1689)..(1689): n is a, c, g, or t
  misc_feature (1692)..(1692): n is a, c, g, or t
  misc_feature (1695)..(1695): n is a, c, g, or t
  misc_feature (1704)..(1704): n is a, c, g, or t
  misc_feature (1707)..(1707): n is a, c, g, or t
  misc_feature (1713)..(1713): n is a, c, g, or t
  misc_feature (1722)..(1722): n is a, c, g, or t
  misc_feature (1725)..(1725): n is a, c, g, or t
  misc_feature (1731)..(1731): n is a, c, g, or t
  misc_feature (1734)..(1734): n is a, c, g, or t
  misc_feature (1737)..(1737): n is a, c, g, or t
  misc_feature (1740)..(1740): n is a, c, g, or t
  misc_feature (1743)..(1743): n is a, c, g, or t
  misc_feature (1746)..(1746): n is a, c, g, or t
  misc_feature (1749)..(1749): n is a, c, g, or t
  misc_feature (1752)..(1752): n is a, c, g, or t
  misc_feature (1755)..(1755): n is a, c, g, or t
  misc_feature (1758)..(1758): n is a, c, g, or t
  misc_feature (1767)..(1767): n is a, c, g, or t
  misc_feature (1776)..(1776): n is a, c, g, or t
  misc_feature (1785)..(1785): n is a, c, g, or t
  misc_feature (1788)..(1788): n is a, c, g, or t
  misc_feature (1791)..(1791): n is a, c, g, or t
  misc_feature (1794)..(1794): n is a, c, g, or t
  misc_feature (1803)..(1803): n is a, c, g, or t
  misc_feature (1806)..(1806): n is a, c, g, or t
  misc_feature (1809)..(1809): n is a, c, g, or t
  misc_feature (1812)..(1812): n is a, c, g, or t
  misc_feature (1815)..(1815): n is a, c, g, or t
  misc_feature (1818)..(1818): n is a, c, g, or t
  misc_feature (1821)..(1821): n is a, c, g, or t
  misc_feature (1827)..(1827): n is a, c, g, or t
  misc_feature (1830)..(1830): n is a, c, g, or t
  misc_feature (1833)..(1833): n is a, c, g, or t
  misc_feature (1836)..(1836): n is a, c, g, or t
  misc_feature (1839)..(1839): n is a, c, g, or t
  misc_feature (1842)..(1842): n is a, c, g, or t
  misc_feature (1848)..(1848): n is a, c, g, or t
  misc_feature (1854)..(1854): n is a, c, g, or t
  misc_feature (1857)..(1857): n is a, c, g, or t
  misc_feature (1863)..(1863): n is a, c, g, or t
  misc_feature (1866)..(1866): n is a, c, g, or t
  misc_feature (1872)..(1872): n is a, c, g, or t
  misc_feature (1875)..(1875): n is a, c, g, or t
  misc_feature (1878)..(1878): n is a, c, g, or t
  misc_feature (1881)..(1881): n is a, c, g, or t
  misc_feature (1884)..(1884): n is a, c, g, or t
  misc_feature (1893)..(1893): n is a, c, g, or t
  misc_feature (1902)..(1902): n is a, c, g, or t
  misc_feature (1911)..(1911): n is a, c, g, or t
  misc_feature (1914)..(1914): n is a, c, g, or t
  misc_feature (1917)..(1917): n is a, c, g, or t
  misc_feature (1920)..(1920): n is a, c, g, or t
  misc_feature (1926)..(1926): n is a, c, g, or t
  misc_feature (1929)..(1929): n is a, c, g, or t
  misc_feature (1932)..(1932): n is a, c, g, or t
  misc_feature (1935)..(1935): n is a, c, g, or t
  misc_feature (1938)..(1938): n is a, c, g, or t
  misc_feature (1941)..(1941): n is a, c, g, or t
  misc_feature (1944)..(1944): n is a, c, g, or t
  misc_feature (1947)..(1947): n is a, c, g, or t
  misc_feature (1956)..(1956): n is a, c, g, or t
  misc_feature (1962)..(1962): n is a, c, g, or t
  misc_feature (1965)..(1965): n is a, c, g, or t
  misc_feature (1968)..(1968): n is a, c, g, or t
  misc_feature (1974)..(1974): n is a, c, g, or t
  misc_feature (1977)..(1977): n is a, c, g, or t
  misc_feature (1980)..(1980): n is a, c, g, or t
  misc_feature (1983)..(1983): n is a, c, g, or t
  misc_feature (1986)..(1986): n is a, c, g, or t
  misc_feature (1989)..(1989): n is a, c, g, or t
  misc_feature (1992)..(1992): n is a, c, g, or t
  misc_feature (1995)..(1995): n is a, c, g, or t
  misc_feature (1998)..(1998): n is a, c, g, or t
  misc_feature (2001)..(2001): n is a, c, g, or t
  misc_feature (2007)..(2007): n is a, c, g, or t
  misc_feature (2010)..(2010): n is a, c, g, or t
  misc_feature (2013)..(2013): n is a, c, g, or t
  misc_feature (2019)..(2019): n is a, c, g, or t
  misc_feature (2022)..(2022): n is a, c, g, or t
  misc_feature (2028)..(2028): n is a, c, g, or t
  misc_feature (2034)..(2034): n is a, c, g, or t
  misc_feature (2037)..(2037): n is a, c, g, or t
  misc_feature (2043)..(2043): n is a, c, g, or t
  misc_feature (2046)..(2046): n is a, c, g, or t
  misc_feature (2052)..(2052): n is a, c, g, or t
  misc_feature (2055)..(2055): n is a, c, g, or t
  misc_feature (2064)..(2064): n is a, c, g, or t
  misc_feature (2070)..(2070): n is a, c, g, or t
  misc_feature (2073)..(2073): n is a, c, g, or t
  misc_feature (2076)..(2076): n is a, c, g, or t
  misc_feature (2079)..(2079): n is a, c, g, or t
  misc_feature (2082)..(2082): n is a, c, g, or t
  misc_feature (2085)..(2085): n is a, c, g, or t
  misc_feature (2088)..(2088): n is a, c, g, or t
  misc_feature (2091)..(2091): n is a, c, g, or t
  misc_feature (2094)..(2094): n is a, c, g, or t
  misc_feature (2100)..(2100): n is a, c, g, or t
  misc_feature (2109)..(2109): n is a, c, g, or t
  misc_feature (2115)..(2115): n is a, c, g, or t
  misc_feature (2118)..(2118): n is a, c, g, or t
  misc_feature (2127)..(2127): n is a, c, g, or t
  misc_feature (2130)..(2130): n is a, c, g, or t
  misc_feature (2133)..(2133): n is a, c, g, or t
  misc_feature (2136)..(2136): n is a, c, g, or t
  misc_feature (2139)..(2139): n is a, c, g, or t
  misc_feature (2142)..(2142): n is a, c, g, or t
  misc_feature (2145)..(2145): n is a, c, g, or t
  misc_feature (2148)..(2148): n is a, c, g, or t
  misc_feature (2151)..(2151): n is a, c, g, or t
  misc_feature (2154)..(2154): n is a, c, g, or t
  misc_feature (2157)..(2157): n is a, c, g, or t
  misc_feature (2163)..(2163): n is a, c, g, or t
  misc_feature (2166)..(2166): n is a, c, g, or t
  misc_feature (2169)..(2169): n is a, c, g, or t
  misc_feature (2172)..(2172): n is a, c, g, or t
  misc_feature (2175)..(2175): n is a, c, g, or t
  misc_feature (2184)..(2184): n is a, c, g, or t
  misc_feature (2190)..(2190): n is a, c, g, or t
  misc_feature (2193)..(2193): n is a, c, g, or t
  misc_feature (2199)..(2199): n is a, c, g, or t
  misc_feature (2202)..(2202): n is a, c, g, or t
  misc_feature (2205)..(2205): n is a, c, g, or t
  misc_feature (2211)..(2211): n is a, c, g, or t
  misc_feature (2220)..(2220): n is a, c, g, or t
  misc_feature (2226)..(2226): n is a, c, g, or t
  misc_feature (2229)..(2229): n is a, c, g, or t
  misc_feature (2232)..(2232): n is a, c, g, or t
  misc_feature (2235)..(2235): n is a, c, g, or t
  misc_feature (2238)..(2238): n is a, c, g, or t
  misc_feature (2241)..(2241): n is a, c, g, or t
  misc_feature (2244)..(2244): n is a, c, g, or t
  misc_feature (2247)..(2247): n is a, c, g, or t
  misc_feature (2250)..(2250): n is a, c, g, or t
  misc_feature (2253)..(2253): n is a, c, g, or t
  misc_feature (2256)..(2256): n is a, c, g, or t
  misc_feature (2265)..(2265): n is a, c, g, or t
  misc_feature (2268)..(2268): n is a, c, g, or t
  misc_feature (2271)..(2271): n is a, c, g, or t
  misc_feature (2274)..(2274): n is a, c, g, or t
  misc_feature (2280)..(2280): n is a, c, g, or t
  misc_feature (2283)..(2283): n is a, c, g, or t
  misc_feature (2292)..(2292): n is a, c, g, or t
  misc_feature (2301)..(2301): n is a, c, g, or t
  misc_feature (2304)..(2304): n is a, c, g, or t
  misc_feature (2310)..(2310): n is a, c, g, or t
  misc_feature (2316)..(2316): n is a, c, g, or t
  misc_feature (2319)..(2319): n is a, c, g, or t
  misc_feature (2322)..(2322): n is a, c, g, or t
  misc_feature (2328)..(2328): n is a, c, g, or t
  misc_feature (2337)..(2337): n is a, c, g, or t
  misc_feature (2346)..(2346): n is a, c, g, or t
  misc_feature (2349)..(2349): n is a, c, g, or t
  misc_feature (2352)..(2352): n is a, c, g, or t
  misc_feature (2355)..(2355): n is a, c, g, or t
  misc_feature (2358)..(2358): n is a, c, g, or t
  misc_feature (2361)..(2361): n is a, c, g, or t
  misc_feature (2364)..(2364): n is a, c, g, or t
  misc_feature (2370)..(2370): n is a, c, g, or t
  misc_feature (2373)..(2373): n is a, c, g, or t
  misc_feature (2379)..(2379): n is a, c, g, or t
  misc_feature (2382)..(2382): n is a, c, g, or t
  misc_feature (2385)..(2385): n is a, c, g, or t
  misc_feature (2391)..(2391): n is a, c, g, or t
  misc_feature (2394)..(2394): n is a, c, g, or t
  misc_feature (2397)..(2397): n is a, c, g, or t
  misc_feature (2400)..(2400): n is a, c, g, or t
  misc_feature (2403)..(2403): n is a, c, g, or t
  misc_feature (2409)..(2409): n is a, c, g, or t
  misc_feature (2418)..(2418): n is a, c, g, or t
  misc_feature (2427)..(2427): n is a, c, g, or t
  misc_feature (2430)..(2430): n is a, c, g, or t
  misc_feature (2436)..(2436): n is a, c, g, or t
  misc_feature (2442)..(2442): n is a, c, g, or t
  misc_feature (2445)..(2445): n is a, c, g, or t
  misc_feature (2451)..(2451): n is a, c, g, or t
  misc_feature (2454)..(2454): n is a, c, g, or t
  misc_feature (2463)..(2463): n is a, c, g, or t
  misc_feature (2466)..(2466): n is a, c, g, or t
  misc_feature (2469)..(2469): n is a, c, g, or t
  misc_feature (2472)..(2472): n is a, c, g, or t
  misc_feature (2481)..(2481): n is a, c, g, or t
  misc_feature (2484)..(2484): n is a, c, g, or t
  misc_feature (2487)..(2487): n is a, c, g, or t
  misc_feature (2490)..(2490): n is a, c, g, or t
  misc_feature (2496)..(2496): n is a, c, g, or t
  misc_feature (2499)..(2499): n is a, c, g, or t
  misc_feature (2502)..(2502): n is a, c, g, or t
  misc_feature (2505)..(2505): n is a, c, g, or t
  misc_feature (2508)..(2508): n is a, c, g, or t
  misc_feature (2511)..(2511): n is a, c, g, or t
  misc_feature (2514)..(2514): n is a, c, g, or t
  misc_feature (2517)..(2517): n is a, c, g, or t
  misc_feature (2520)..(2520): n is a, c, g, or t
  misc_feature (2523)..(2523): n is a, c, g, or t
  misc_feature (2526)..(2526): n is a, c, g, or t
  misc_feature (2529)..(2529): n is a, c, g, or t
  misc_feature (2532)..(2532): n is a, c, g, or t
  misc_feature (2535)..(2535): n is a, c, g, or t
  misc_feature (2538)..(2538): n is a, c, g, or t
  misc_feature (2541)..(2541): n is a, c, g, or t
  misc_feature (2544)..(2544): n is a, c, g, or t
  misc_feature (2547)..(2547): n is a, c, g, or t
  misc_feature (2553)..(2553): n is a, c, g, or t
  misc_feature (2556)..(2556): n is a, c, g, or t
  misc_feature (2559)..(2559): n is a, c, g, or t
  misc_feature (2562)..(2562): n is a, c, g, or t
  misc_feature (2565)..(2565): n is a, c, g, or t
  misc_feature (2568)..(2568): n is a, c, g, or t
  misc_feature (2571)..(2571): n is a, c, g, or t
  misc_feature (2574)..(2574): n is a, c, g, or t
  misc_feature (2577)..(2577): n is a, c, g, or t
  misc_feature (2580)..(2580): n is a, c, g, or t
  misc_feature (2589)..(2589): n is a, c, g, or t
  misc_feature (2592)..(2592): n is a, c, g, or t
  misc_feature (2598)..(2598): n is a, c, g, or t
  misc_feature (2607)..(2607): n is a, c, g, or t
  misc_feature (2610)..(2610): n is a, c, g, or t
  misc_feature (2613)..(2613): n is a, c, g, or t
  misc_feature (2616)..(2616): n is a, c, g, or t
  misc_feature (2622)..(2622): n is a, c, g, or t
  misc_feature (2625)..(2625): n is a, c, g, or t
  misc_feature (2634)..(2634): n is a, c, g, or t
  misc_feature (2640)..(2640): n is a, c, g, or t
  misc_feature (2643)..(2643): n is a, c, g, or t
  misc_feature (2649)..(2649): n is a, c, g, or t
  misc_feature (2652)..(2652): n is a, c, g, or t
  misc_feature (2655)..(2655): n is a, c, g, or t
  misc_feature (2661)..(2661): n is a, c, g, or t
  misc_feature (2670)..(2670): n is a, c, g, or t
  misc_feature (2673)..(2673): n is a, c, g, or t
  misc_feature (2679)..(2679): n is a, c, g, or t
  misc_feature (2685)..(2685): n is a, c, g, or t
  misc_feature (2688)..(2688): n is a, c, g, or t
  misc_feature (2691)..(2691): n is a, c, g, or t
  misc_feature (2697)..(2697): n is a, c, g, or t
  misc_feature (2703)..(2703): n is a, c, g, or t
  misc_feature (2706)..(2706): n is a, c, g, or t
  misc_feature (2715)..(2715): n is a, c, g, or t
  misc_feature (2718)..(2718): n is a, c, g, or t
  misc_feature (2724)..(2724): n is a, c, g, or t
  misc_feature (2727)..(2727): n is a, c, g, or t
  misc_feature (2730)..(2730): n is a, c, g, or t
  misc_feature (2733)..(2733): n is a, c, g, or t
  misc_feature (2742)..(2742): n is a, c, g, or t
  misc_feature (2748)..(2748): n is a, c, g, or t
  misc_feature (2751)..(2751): n is a, c, g, or t
  misc_feature (2754)..(2754): n is a, c, g, or t
  misc_feature (2760)..(2760): n is a, c, g, or t
  misc_feature (2763)..(2763): n is a, c, g, or t
  misc_feature (2769)..(2769): n is a, c, g, or t
  misc_feature (2775)..(2775): n is a, c, g, or t
  misc_feature (2778)..(2778): n is a, c, g, or t
  misc_feature (2784)..(2784): n is a, c, g, or t
  misc_feature (2787)..(2787): n is a, c, g, or t
  misc_feature (2793)..(2793): n is a, c, g, or t
  misc_feature (2796)..(2796): n is a, c, g, or t
  misc_feature (2799)..(2799): n is a, c, g, or t
  misc_feature (2805)..(2805): n is a, c, g, or t
  misc_feature (2808)..(2808): n is a, c, g, or t
  misc_feature (2814)..(2814): n is a, c, g, or t
  misc_feature (2820)..(2820): n is a, c, g, or t
  misc_feature (2823)..(2823): n is a, c, g, or t
  misc_feature (2829)..(2829): n is a, c, g, or t
  misc_feature (2832)..(2832): n is a, c, g, or t
  misc_feature (2835)..(2835): n is a, c, g, or t
  misc_feature (2838)..(2838): n is a, c, g, or t
  misc_feature (2841)..(2841): n is a, c, g, or t
  misc_feature (2844)..(2844): n is a, c, g, or t
  misc_feature (2850)..(2850): n is a, c, g, or t
  misc_feature (2859)..(2859): n is a, c, g, or t
  misc_feature (2862)..(2862): n is a, c, g, or t
  misc_feature (2865)..(2865): n is a, c, g, or t
  misc_feature (2868)..(2868): n is a, c, g, or t
  misc_feature (2871)..(2871): n is a, c, g, or t
  misc_feature (2874)..(2874): n is a, c, g, or t
  misc_feature (2877)..(2877): n is a, c, g, or t
  misc_feature (2880)..(2880): n is a, c, g, or t
  misc_feature (2883)..(2883): n is a, c, g, or t
  misc_feature (2886)..(2886): n is a, c, g, or t
  misc_feature (2895)..(2895): n is a, c, g, or t
  misc_feature (2901)..(2901): n is a, c, g, or t
  misc_feature (2904)..(2904): n is a, c, g, or t
  misc_feature (2910)..(2910): n is a, c, g, or t
  misc_feature (2913)..(2913): n is a, c, g, or t
  misc_feature (2916)..(2916): n is a, c, g, or t
  misc_feature (2922)..(2922): n is a, c, g, or t
  misc_feature (2925)..(2925): n is a, c, g, or t
  misc_feature (2928)..(2928): n is a, c, g, or t
  misc_feature (2931)..(2931): n is a, c, g, or t
  misc_feature (2937)..(2937): n is a, c, g, or t
  misc_feature (2940)..(2940): n is a, c, g, or t
  misc_feature (2943)..(2943): n is a, c, g, or t
  misc_feature (2946)..(2946): n is a, c, g, or t
  misc_feature (2949)..(2949): n is a, c, g, or t
  misc_feature (2952)..(2952): n is a, c, g, or t
  misc_feature (2955)..(2955): n is a, c, g, or t
  misc_feature (2958)..(2958): n is a, c, g, or t
  misc_feature (2961)..(2961): n is a, c, g, or t
  misc_feature (2964)..(2964): n is a, c, g, or t
  misc_feature (2967)..(2967): n is a, c, g, or t
  misc_feature (2970)..(2970): n is a, c, g, or t
  misc_feature (2973)..(2973): n is a, c, g, or t
ggnccnaarggngayacnggnccnccnggnccnccnggnccngcnggnathccnggnccnwsnggnaarmgnggnccnmgnggnathccnggnccncayggnaayccnggnytnccnggnytnccnggnccnaarggnccnaarggngayccnggnttywsnccnggncarccngtnccnggngaraarggngaycarggnytnwsnggnytnatgggnccnccnggnatgcarggngayaarggnytnaarggncayccnggnytnccnggnytnccnggngarcarggnathccnggnttygcnggnaayathggnwsnccnggntayccnggnmgncarggnytngcnggnccngarggnaayccnggnccnaarggngcncarggnttyathggnwsnccnggngargcnggncarytnggnccngarggngarmgnggnathccnggnathmgnggnaaraarggnttyaarggnmgncarggnttyccnggngayttyggngaymgnggnccngcnggnytngayggnwsnccnggnytngtnggnggnacnggnccnccnggnttyccnggnytnmgnggnwsngtnggnccngtnggnccnathggnccngcnggnathccnggnccnatgggnytnwsnggnaayaarggnytnccnggnathaarggngayaarggngarcarggnacngcnggngarytnggngarccnggntayccnggngayaarggngcngtnggnytnccnggnccnccnggnatgmgnggnaarwsnggnccnwsnggncaracnggngayccnggnytncarggnccnwsnggnccnccnggnccngarggnttyccnggngayathggnathccnggncaraayggnccngarggnccnaarggnytnytnggnaaymgnggnccnccnggnccnccnggnytnaarggnacncarggngargarggnccnathggngcnttyggngarytnggnccnmgnggnaarccnggncaraarggntaygcnggngarccnggnccngarggnytnaarggngargtnggngaycarggnaayathggnaarathggngaracnggnccngtnggnytnccnggngargtnggnatgacnggnwsnathggngaraarggngarmgnggnwsnccnggnccnytnggnccncarggngaraarggngtnatgggntayccnggnccnccnggngtnccnggnccnathggnccnytnggnytnccnggncaygtnggngcnmgnggnccnccnggnwsncarggnccnaarggncarmgnggnwsnmgnggnccngayggnytnytnggngarcarggnathcarggngcnaarggngaraarggngaycarggnaarmgnggnccncayggnytnathggnaaracnggnaayccnggngarmgnggnttycarggnaarccnggnytncarggnytnccnggnwsnacnggngaymgnggnytnccnggngarccnggnytnmgnggnytncarggngaygtnggnccnccnggngaratgggnatggarggnccnccnggnacngarggngarwsnggnytncarggngarccnggngcnaarggngaygtnggnacngcnggnwsngtnggnggnacnggngarccnggnytnmgnggngarccnggngcnccnggngargarggnytncarggnaargayggnytnaarggngtnccnggnggnmgnggnytnccnggngargayggngaraarggngaratgggnytnccnggnathathggnccnytnggnmgnwsnggncaracnggnytnccnggnccngarggnathgtnggnathccnggncarmgnggnmgnccnggnaaraarggngayaarggncarathggnccnacnggngargtnggnwsnmgnggnccnccnggnaarathggnaarwsnggnccnaarggngcnmgnggnacnmgnggngcngtnggncayytnggnytnatgggnccngayggngarccnggnathccnggntaymgnggncaycarggncarccnggnccnwsnggnytnccnggnccnaarggngaraarggntayccnggngargaywsnacngtnytnggnccnccnggnccnmgnggngarccnggnccngtnggngaycarggngarmgnggngarccnggngcngarggntayaarggncaygtnggngtnccnggnytnmgnggngcnacnggncarcarggnccnccnggngarccnggngaycarggngarcarggnytnaarggngarmgnggnwsngarggnaayaarggnaaraarggngcnccnggnccnwsnggnaarccnggnathccnggnytncarggnytnytnggnccnaarggnathcarggntaycayggngcngayggnathwsnggnaayccnggnaarathggnccnccnggnaarcarggnytnccnggnathmgnggnggnccnggnmgnacnggnytngcnggngcnccnggnccnccnggngtnaarggnwsnwsnggnytnccnggnwsnccnggnathcarggnccnaarggngarcarggnytnccnggncarccnggnathcarggnaarmgnggncaymgnggngcncarggngaycarggnccntgyggngayccnggnytnaarggncarccnggngartayggngtncarggnytnacnggnttycarggnttyccnggnccnaarggnccngarggngaygcnggnathgtnggnathwsnggnccnaarggnccnathggncaymgnggnaayacnggnccnytnggnmgngarggnathathggnccnacnggnmgnacnggnccnmgnggngaraarggnttymgnggngaracnggnccncarggnccnmgnggncarccnggnccnccnggnccnccnggngcnccnggnccnmgn

SEQ ID NO: 1140 - DNA, 1524 bp, Artificial Sequence
  hCol-CNA45 (alpha1(XXV) THD)
  misc_feature (3)..(3): n is a, c, g, or t
  misc_feature (6)..(6): n is a, c, g, or t
  misc_feature (9)..(9): n is a, c, g, or t
  misc_feature (12)..(12): n is a, c, g, or t
  misc_feature (18)..(18): n is a, c, g, or t
  misc_feature (21)..(21): n is a, c, g, or t
  misc_feature (27)..(27): n is a, c, g, or t
  misc_feature (30)..(30): n is a, c, g, or t
  misc_feature (33)..(33): n is a, c, g, or t
  misc_feature (36)..(36): n is a, c, g, or t
  misc_feature (39)..(39): n is a, c, g, or t
  misc_feature (45)..(45): n is a, c, g, or t
  misc_feature (48)..(48): n is a, c, g, or t
  misc_feature (51)..(51): n is a, c, g, or t
  misc_feature (54)..(54): n is a, c, g, or t
  misc_feature (57)..(57): n is a, c, g, or t
  misc_feature (63)..(63): n is a, c, g, or t
  misc_feature (66)..(66): n is a, c, g, or t
  misc_feature (69)..(69): n is a, c, g, or t
  misc_feature (75)..(75): n is a, c, g, or t
  misc_feature (78)..(78): n is a, c, g, or t
  misc_feature (81)..(81): n is a, c, g, or t
  misc_feature (84)..(84): n is a, c, g, or t
  misc_feature (87)..(87): n is a, c, g, or t
  misc_feature (93)..(93): n is a, c, g, or t
  misc_feature (102)..(102): n is a, c, g, or t
  misc_feature (111)..(111): n is a, c, g, or t
  misc_feature (120)..(120): n is a, c, g, or t
  misc_feature (123)..(123): n is a, c, g, or t
  misc_feature (126)..(126): n is a, c, g, or t
  misc_feature (132)..(132): n is a, c, g, or t
  misc_feature (138)..(138): n is a, c, g, or t
  misc_feature (153)..(153): n is a, c, g, or t
  misc_feature (159)..(159): n is a, c, g, or t
  misc_feature (162)..(162): n is a, c, g, or t
  misc_feature (165)..(165): n is a, c, g, or t
  misc_feature (177)..(177): n is a, c, g, or t
  misc_feature (186)..(186): n is a, c, g, or t
  misc_feature (189)..(189): n is a, c, g, or t
  misc_feature (192)..(192): n is a, c, g, or t
  misc_feature (201)..(201): n is a, c, g, or t
  misc_feature (210)..(210): n is a, c, g, or t
  misc_feature (216)..(216): n is a, c, g, or t
  misc_feature (219)..(219): n is a, c, g, or t
  misc_feature (222)..(222): n is a, c, g, or t
  misc_feature (225)..(225): n is a, c, g, or t
  misc_feature (228)..(228): n is a, c, g, or t
  misc_feature (231)..(231): n is a, c, g, or t
  misc_feature (234)..(234): n is a, c, g, or t
  misc_feature (237)..(237): n is a, c, g, or t
  misc_feature (240)..(240): n is a, c, g, or t
  misc_feature (243)..(243): n is a, c, g, or t
  misc_feature (246)..(246): n is a, c, g, or t
  misc_feature (249)..(249): n is a, c, g, or t
  misc_feature (252)..(252): n is a, c, g, or t
  misc_feature (255)..(255): n is a, c, g, or t
  misc_feature (258)..(258): n is a, c, g, or t
  misc_feature (261)..(261): n is a, c, g, or t
  misc_feature (264)..(264): n is a, c, g, or t
  misc_feature (270)..(270): n is a, c, g, or t
  misc_feature (273)..(273): n is a, c, g, or t
  misc_feature (282)..(282): n is a, c, g, or t
  misc_feature (285)..(285): n is a, c, g, or t
  misc_feature (288)..(288): n is a, c, g, or t
  misc_feature (291)..(291): n is a, c, g, or t
  misc_feature (297)..(297): n is a, c, g, or t
  misc_feature (300)..(300): n is a, c, g, or t
  misc_feature (303)..(303): n is a, c, g, or t
  misc_feature (306)..(306): n is a, c, g, or t
  misc_feature (309)..(309): n is a, c, g, or t
  misc_feature (315)..(315): n is a, c, g, or t
  misc_feature (318)..(318): n is a, c, g, or t
  misc_feature (324)..(324): n is a, c, g, or t
  misc_feature (327)..(327): n is a, c, g, or t
  misc_feature (336)..(336): n is a, c, g, or t
  misc_feature (339)..(339): n is a, c, g, or t
  misc_feature (345)..(345): n is a, c, g, or t
  misc_feature (348)..(348): n is a, c, g, or t
  misc_feature (351)..(351): n is a, c, g, or t
  misc_feature (354)..(354): n is a, c, g, or t
  misc_feature (357)..(357): n is a, c, g, or t
  misc_feature (360)..(360): n is a, c, g, or t
  misc_feature (363)..(363): n is a, c, g, or t
  misc_feature (372)..(372): n is a, c, g, or t
  misc_feature (375)..(375): n is a, c, g, or t
  misc_feature (381)..(381): n is a, c, g, or t
  misc_feature (384)..(384): n is a, c, g, or t
  misc_feature (387)..(387): n is a, c, g, or t
  misc_feature (390)..(390): n is a, c, g, or t
  misc_feature (396)..(396): n is a, c, g, or t
  misc_feature (399)..(399): n is a, c, g, or t
  misc_feature (408)..(408): n is a, c, g, or t
  misc_feature (417)..(417): n is a, c, g, or t
  misc_feature (423)..(423): n is a, c, g, or t
  misc_feature (426)..(426): n is a, c, g, or t
  misc_feature (429)..(429): n is a, c, g, or t
  misc_feature (432)..(432): n is a, c, g, or t
  misc_feature (435)..(435): n is a, c, g, or t
  misc_feature (438)..(438): n is a, c, g, or t
  misc_feature (441)..(441): n is a, c, g, or t
  misc_feature (444)..(444): n is a, c, g, or t
  misc_feature (453)..(453): n is a, c, g, or t
  misc_feature (459)..(459): n is a, c, g, or t
  misc_feature (462)..(462): n is a, c, g, or t
  misc_feature (465)..(465): n is a, c, g, or t
  misc_feature (471)..(471): n is a, c, g, or t
  misc_feature (477)..(477): n is a, c, g, or t
  misc_feature (480)..(480): n is a, c, g, or t
  misc_feature (489)..(489): n is a, c, g, or t
  misc_feature (498)..(498): n is a, c, g, or t
  misc_feature (504)..(504): n is a, c, g, or t
  misc_feature (507)..(507): n is a, c, g, or t
  misc_feature (516)..(516): n is a, c, g, or t
  misc_feature (519)..(519): n is a, c, g, or t
  misc_feature (525)..(525): n is a, c, g, or t
  misc_feature (531)..(531): n is a, c, g, or t
  misc_feature (534)..(534): n is a, c, g, or t
  misc_feature (543)..(543): n is a, c, g, or t
  misc_feature (549)..(549): n is a, c, g, or t
  misc_feature (552)..(552): n is a, c, g, or t
  misc_feature (555)..(555): n is a, c, g, or t
  misc_feature (558)..(558): n is a, c, g, or t
  misc_feature (561)..(561): n is a, c, g, or t
  misc_feature (564)..(564): n is a, c, g, or t
  misc_feature (567)..(567): n is a, c, g, or t
  misc_feature (576)..(576): n is a, c, g, or t
  misc_feature (582)..(582): n is a, c, g, or t
  misc_feature (585)..(585): n is a, c, g, or t
  misc_feature (591)..(591): n is a, c, g, or t
  misc_feature (594)..(594): n is a, c, g, or t
  misc_feature (597)..(597): n is a, c, g, or t
  misc_feature (600)..(600): n is a, c, g, or t
  misc_feature (603)..(603): n is a, c, g, or t
  misc_feature (612)..(612): n is a, c, g, or t
  misc_feature (618)..(618): n is a, c, g, or t
  misc_feature (621)..(621): n is a, c, g, or t
  misc_feature (624)..(624): n is a, c, g, or t
  misc_feature (627)..(627): n is a, c, g, or t
  misc_feature (630)..(630): n is a, c, g, or t
  misc_feature (633)..(633): n is a, c, g, or t
  misc_feature (636)..(636): n is a, c, g, or t
  misc_feature (639)..(639): n is a, c, g, or t
  misc_feature (642)..(642): n is a, c, g, or t
  misc_feature (645)..(645): n is a, c, g, or t
  misc_feature (648)..(648): n is a, c, g, or t
  misc_feature (657)..(657): n is a, c, g, or t
  misc_feature (663)..(663): n is a, c, g, or t
  misc_feature (666)..(666): n is a, c, g, or t
  misc_feature (675)..(675): n is a, c, g, or t
  misc_feature (678)..(678): n is a, c, g, or t
  misc_feature (684)..(684): n is a, c, g, or t
  misc_feature (690)..(690): n is a, c, g, or t
  misc_feature (693)..(693): n is a, c, g, or t
  misc_feature (696)..(696): n is a, c, g, or t
  misc_feature (699)..(699): n is a, c, g, or t
  misc_feature (702)..(702): n is a, c, g, or t
  misc_feature (705)..(705): n is a, c, g, or t
  misc_feature (708)..(708): n is a, c, g, or t
  misc_feature (711)..(711): n is a, c, g, or t
  misc_feature (714)..(714): n is a, c, g, or t
  misc_feature (720)..(720): n is a, c, g, or t
  misc_feature (726)..(726): n is a, c, g, or t
  misc_feature (729)..(729): n is a, c, g, or t
  misc_feature (735)..(735): n is a, c, g, or t
  misc_feature (738)..(738): n is a, c, g, or t
  misc_feature (741)..(741): n is a, c, g, or t
  misc_feature (744)..(744): n is a, c, g, or t
  misc_feature (747)..(747): n is a, c, g, or t
  misc_feature (750)..(750): n is a, c, g, or t
  misc_feature (753)..(753): n is a, c, g, or t
  misc_feature (759)..(759): n is a, c, g, or t
  misc_feature (762)..(762): n is a, c, g, or t
  misc_feature (768)..(768): n is a, c, g, or t
  misc_feature (771)..(771): n is a, c, g, or t
  misc_feature (774)..(774): n is a, c, g, or t
  misc_feature (777)..(777): n is a, c, g, or t
  misc_feature (780)..(780): n is a, c, g, or t
  misc_feature (783)..(783): n is a, c, g, or t
  misc_feature (789)..(789): n is a, c, g, or t
  misc_feature (798)..(798): n is a, c, g, or t
  misc_feature (804)..(804): n is a, c, g, or t
  misc_feature (807)..(807): n is a, c, g, or t
  misc_feature (810)..(810): n is a, c, g, or t
  misc_feature (813)..(813): n is a, c, g, or t
  misc_feature (816)..(816): n is a, c, g, or t
  misc_feature (819)..(819): n is a, c, g, or t
  misc_feature (825)..(825): n is a, c, g, or t
  misc_feature (828)..(828): n is a, c, g, or t
  misc_feature (834)..(834): n is a, c, g, or t
  misc_feature (840)..(840): n is a, c, g, or t
  misc_feature (843)..(843): n is a, c, g, or t
  misc_feature (852)..(852): n is a, c, g, or t
  misc_feature (858)..(858): n is a, c, g, or t
  misc_feature (861)..(861): n is a, c, g, or t
  misc_feature (864)..(864): n is a, c, g, or t
  misc_feature (870)..(870): n is a, c, g, or t
  misc_feature (873)..(873): n is a, c, g, or t
  misc_feature (876)..(876): n is a, c, g, or t
  misc_feature (879)..(879): n is a, c, g, or t
  misc_feature (882)..(882): n is a, c, g, or t
  misc_feature (885)..(885): n is a, c, g, or t
  misc_feature (888)..(888): n is a, c, g, or t
  misc_feature (897)..(897): n is a, c, g, or t
  misc_feature (906)..(906): n is a, c, g, or t
  misc_feature (909)..(909): n is a, c, g, or t
  misc_feature (912)..(912): n is a, c, g, or t
  misc_feature (933)..(933): n is a, c, g, or t
  misc_feature (939)..(939): n is a, c, g, or t
  misc_feature (948)..(948): n is a, c, g, or t
  misc_feature (951)..(951): n is a, c, g, or t
  misc_feature (957)..(957): n is a, c, g, or t
  misc_feature (963)..(963): n is a, c, g, or t
  misc_feature (966)..(966): n is a, c, g, or t
  misc_feature (969)..(969): n is a, c, g, or t
  misc_feature (972)..(972): n is a, c, g, or t
  misc_feature (975)..(975): n is a, c, g, or t
  misc_feature (978)..(978): n is a, c, g, or t
  misc_feature (981)..(981): n is a, c, g, or t
  misc_feature (984)..(984): n is a, c, g, or t
  misc_feature (987)..(987): n is a, c, g, or t
  misc_feature (990)..(990): n is a, c, g, or t
  misc_feature (993)..(993): n is a, c, g, or t
  misc_feature (996)..(996): n is a, c, g, or t
  misc_feature (999)..(999): n is a, c, g, or t
  misc_feature (1002)..(1002): n is a, c, g, or t
  misc_feature (1008)..(1008): n is a, c, g, or t
  misc_feature (1011)..(1011): n is a, c, g, or t
  misc_feature (1017)..(1017): n is a, c, g, or t
  misc_feature (1020)..(1020): n is a, c, g, or t
  misc_feature (1026)..(1026): n is a, c, g, or t
  misc_feature (1035)..(1035): n is a, c, g, or t
  misc_feature (1038)..(1038): n is a, c, g, or t
  misc_feature (1041)..(1041): n is a, c, g, or t
  misc_feature (1044)..(1044): n is a, c, g, or t
  misc_feature (1050)..(1050): n is a, c, g, or t
  misc_feature (1053)..(1053): n is a, c, g, or t
  misc_feature (1062)..(1062): n is a, c, g, or t
  misc_feature (1071)..(1071): n is a, c, g, or t
  misc_feature (1074)..(1074): n is a, c, g, or t
  misc_feature (1080)..(1080): n is a, c, g, or t
  misc_feature (1083)..(1083): n is a, c, g, or t
  misc_feature (1089)..(1089): n is a, c, g, or t
  misc_feature (1098)..(1098): n is a, c, g, or t
  misc_feature (1104)..(1104): n is a, c, g, or t
  misc_feature (1107)..(1107): n is a, c, g, or t
  misc_feature (1113)..(1113): n is a, c, g, or t
  misc_feature (1116)..(1116): n is a, c, g, or t
  misc_feature (1125)..(1125): n is a, c, g, or t
  misc_feature (1128)..(1128): n is a, c, g, or t
  misc_feature (1134)..(1134): n is a, c, g, or t
  misc_feature (1137)..(1137): n is a, c, g, or t
  misc_feature (1140)..(1140): n is a, c, g, or t
  misc_feature (1143)..(1143): n is a, c, g, or t
  misc_feature (1146)..(1146): n is a, c, g, or t
  misc_feature (1149)..(1149): n is a, c, g, or t
  misc_feature (1152)..(1152): n is a, c, g, or t
  misc_feature (1155)..(1155): n is a, c, g, or t
  misc_feature (1161)..(1161): n is a, c, g, or t
  misc_feature (1170)..(1170): n is a, c, g, or t
  misc_feature (1179)..(1179): n is a, c, g, or t
  misc_feature (1185)..(1185): n is a, c, g, or t
  misc_feature (1188)..(1188): n is a, c, g, or t
  misc_feature (1194)..(1194): n is a, c, g, or t
  misc_feature (1197)..(1197): n is a, c, g, or t
  misc_feature (1200)..(1200): n is a, c, g, or t
  misc_feature (1206)..(1206): n is a, c, g, or t
  misc_feature (1209)..(1209): n is a, c, g, or t
  misc_feature (1212)..(1212): n is a, c, g, or t
  misc_feature (1221)..(1221): n is a, c, g, or t
  misc_feature (1224)..(1224): n is a, c, g, or t
  misc_feature (1227)..(1227): n is a, c, g, or t
  misc_feature (1230)..(1230): n is a, c, g, or t
  misc_feature (1233)..(1233): n is a, c, g, or t
  misc_feature (1236)..(1236): n is a, c, g, or t
  misc_feature (1239)..(1239): n is a, c, g, or t
  misc_feature (1242)..(1242): n is a, c, g, or t
  misc_feature (1248)..(1248): n is a, c, g, or t
  misc_feature (1251)..(1251): n is a, c, g, or t
  misc_feature (1254)..(1254): n is a, c, g, or t
  misc_feature (1257)..(1257): n is a, c, g, or t
  misc_feature (1260)..(1260): n is a, c, g, or t
  misc_feature (1266)..(1266): n is a, c, g, or t
  misc_feature (1269)..(1269): n is a, c, g, or t
  misc_feature (1275)..(1275): n is a, c, g, or t
  misc_feature (1278)..(1278): n is a, c, g, or t
  misc_feature (1281)..(1281): n is a, c, g, or t
  misc_feature (1284)..(1284): n is a, c, g, or t
  misc_feature (1287)..(1287): n is a, c, g, or t
  misc_feature (1293)..(1293): n is a, c, g, or t
  misc_feature (1296)..(1296): n is a, c, g, or t
  misc_feature (1302)..(1302): n is a, c, g, or t
  misc_feature (1305)..(1305): n is a, c, g, or t
  misc_feature (1311)..(1311): n is a, c, g, or t
  misc_feature (1314)..(1314): n is a, c, g, or t
  misc_feature (1320)..(1320): n is a, c, g, or t
  misc_feature (1323)..(1323): n is a, c, g, or t
  misc_feature (1326)..(1326): n is a, c, g, or t
  misc_feature (1329)..(1329): n is a, c, g, or t
  misc_feature (1332)..(1332): n is a, c, g, or t
  misc_feature (1338)..(1338): n is a, c, g, or t
  misc_feature (1344)..(1344): n is a, c, g, or t
  misc_feature (1347)..(1347): n is a, c, g, or t
  misc_feature (1356)..(1356): n is a, c, g, or t
  misc_feature (1359)..(1359): n is a, c, g, or t
  misc_feature (1365)..(1365): n is a, c, g, or t
  misc_feature (1371)..(1371): n is a, c, g, or t
  misc_feature (1374)..(1374): n is a, c, g, or t
  misc_feature (1377)..(1377): n is a, c, g, or t
  misc_feature (1380)..(1380): n is a, c, g, or t
  misc_feature (1383)..(1383): n is a, c, g, or t
  misc_feature (1386)..(1386): n is a, c, g, or t
  misc_feature (1392)..(1392): n is a, c, g, or t
  misc_feature (1395)..(1395): n is a, c, g, or t
  misc_feature (1398)..(1398): n is a, c, g, or t
  misc_feature (1401)..(1401): n is a, c, g, or t
  misc_feature (1410)..(1410): n is a, c, g, or t
  misc_feature (1416)..(1416): n is a, c, g, or t
  misc_feature (1419)..(1419): n is a, c, g, or t
  misc_feature (1422)..(1422): n is a, c, g, or t
  misc_feature (1428)..(1428): n is a, c, g, or t
  misc_feature (1434)..(1434): n is a, c, g, or t
  misc_feature (1437)..(1437): n is a, c, g, or t
  misc_feature (1440)..(1440): n is a, c, g, or t
  misc_feature (1443)..(1443): n is a, c, g, or t
  misc_feature (1446)..(1446): n is a, c, g, or t
  misc_feature (1455)..(1455): n is a, c, g, or t
  misc_feature (1461)..(1461): n is a, c, g, or t
  misc_feature (1464)..(1464): n is a, c, g, or t
  misc_feature (1473)..(1473): n is a, c, g, or t
  misc_feature (1482)..(1482): n is a, c, g, or t
  misc_feature (1488)..(1488): n is a, c, g, or t
  misc_feature (1491)..(1491): n is a, c, g, or t
  misc_feature (1494)..(1494): n is a, c, g, or t
  misc_feature (1500)..(1500): n is a, c, g, or t
  misc_feature (1509)..(1509): n is a, c, g, or t
  misc_feature (1515)..(1515): n is a, c, g, or t
  misc_feature (1518)..(1518): n is a, c, g, or t
  misc_feature (1524)..(1524): n is a, c, g, or t
ggnccnccnggnaarmgnggnaarmgnggnmgnmgnggngarwsnggnccnccnggncarccnggnccncarggnccnccnggnccnaarggngayaarggngarcarggngaycarggnccnmgnatggtnttyccnaarathaaycayggnttyytnwsngcngaycarcarytnathaarmgnmgnytnathaarggngaycarggncargcnggnccnccnggnccnccnggnccnccnggnccnmgnggnccnccnggngayacnggnaargayggnccnmgnggnatgccnggngtnccnggngarccnggnaarccnggngarcarggnytnatgggnccnytnggnccnccnggncaraarggnwsnathggngcnccnggnathccnggnatgaayggncaraarggngarccnggnytnccnggngcngtnggncaraayggnathccnggnccnaarggngarccnggngarcarggngaraarggngaygcnggngaraayggnccnaarggngayacnggngaraarggngayccnggnwsnwsngcngcnggnathaarggngarccnggngarwsnggnmgnccnggncaraarggngarccnggnytnccnggnytnccnggnytnccnggnathaarggngarccnggnttyathggnccncarggngarccnggnytnccnggnytnccnggnacnaarggngarmgnggngargcnggnccnccnggnmgnggngarmgnggngarccnggngcnccnggnccnaarggnaarcarggngarwsnggnacnmgnggnccnaarggnwsnaarggngaymgnggngaraarggngaywsnggngcncarggnccnmgnggnccnccnggncaraarggngaycarggngcnacngarathathgaytayaayggnaayytncaygargcnytncarmgnathacnacnytnacngtnacnggnccnccnggnccnccnggnccncarggnytncarggnccnaarggngarcarggnwsnccnggnathccnggnatggayggngarcarggnytnaarggnwsnaarggngayatgggngayccnggnatgacnggngaraarggnggnathggnytnccnggnytnccnggngcnaayggnatgaarggngaraarggngaywsnggnatgccnggnccncarggnccnwsnathathggnccnccnggnccnccnggnccncayggnccnccnggnccnatgggnccncayggnytnccnggnccnaarggnacngayggnccnatgggnccncayggnccngcnggnccnaarggngarmgnggngaraarggngcnatgggngarccnggnccnmgnggnccntayggnytnccnggnaargayggngarccnggnytngayggnttyccnggnccnmgnggngaraarggngayytnggngaraarggngaraarggnttymgnggngtnaarggngaraarggngarccnggncarccn

SEQ ID NO: 1141 - DNA, 207 bp, Artificial Sequence
  hCol-CNA46 (alpha1(XXVI) THD1)
  misc_feature (3)..(3): n is a, c, g, or t
  misc_feature (6)..(6): n is a, c, g, or t
  misc_feature (9)..(9): n is a, c, g, or t
  misc_feature (12)..(12): n is a, c, g, or t
  misc_feature (15)..(15): n is a, c, g, or t
  misc_feature (18)..(18): n is a, c, g, or t
  misc_feature (21)..(21): n is a, c, g, or t
  misc_feature (27)..(27): n is a, c, g, or t
  misc_feature (30)..(30): n is a, c, g, or t
  misc_feature (33)..(33): n is a, c, g, or t
  misc_feature (36)..(36): n is a, c, g, or t
  misc_feature (39)..(39): n is a, c, g, or t
  misc_feature (42)..(42): n is a, c, g, or t
  misc_feature (45)..(45): n is a, c, g, or t
  misc_feature (48)..(48): n is a, c, g, or t
  misc_feature (51)..(51): n is a, c, g, or t
  misc_feature (54)..(54): n is a, c, g, or t
  misc_feature (57)..(57): n is a, c, g, or t
  misc_feature (60)..(60): n is a, c, g, or t
  misc_feature (66)..(66): n is a, c, g, or t
  misc_feature (72)..(72): n is a, c, g, or t
  misc_feature (75)..(75): n is a, c, g, or t
  misc_feature (81)..(81): n is a, c, g, or t
  misc_feature (84)..(84): n is a, c, g, or t
  misc_feature (93)..(93): n is a, c, g, or t
  misc_feature (96)..(96): n is a, c, g, or t
  misc_feature (99)..(99): n is a, c, g, or t
  misc_feature (102)..(102): n is a, c, g, or t
  misc_feature (105)..(105): n is a, c, g, or t
  misc_feature (108)..(108): n is a, c, g, or t
  misc_feature (111)..(111): n is a, c, g, or t
  misc_feature (114)..(114): n is a, c, g, or t
  misc_feature (117)..(117): n is a, c, g, or t
  misc_feature (120)..(120): n is a, c, g, or t
  misc_feature (123)..(123): n is a, c, g, or t
  misc_feature (126)..(126): n is a, c, g, or t
  misc_feature (129)..(129): n is a, c, g, or t
  misc_feature (132)..(132): n is a, c, g, or t
  misc_feature (135)..(135): n is a, c, g, or t
  misc_feature (138)..(138): n is a, c, g, or t
  misc_feature (141)..(141): n is a, c, g, or t
  misc_feature (144)..(144): n is a, c, g, or t
  misc_feature (147)..(147): n is a, c, g, or t
  misc_feature (156)..(156): n is a, c, g, or t
  misc_feature (159)..(159): n is a, c, g, or t
  misc_feature (162)..(162): n is a, c, g, or t
  misc_feature (165)..(165): n is a, c, g, or t
  misc_feature (168)..(168): n is a, c, g, or t
  misc_feature (171)..(171): n is a, c, g, or t
  misc_feature (174)..(174): n is a, c, g, or t
  misc_feature (177)..(177): n is a, c, g, or t
  misc_feature (180)..(180): n is a, c, g, or t
  misc_feature (183)..(183): n is a, c, g, or t
  misc_feature (186)..(186): n is a, c, g, or t
  misc_feature (189)..(189): n is a, c, g, or t
  misc_feature (192)..(192): n is a, c, g, or t
  misc_feature (198)..(198): n is a, c, g, or t
  misc_feature (201)..(201): n is a, c, g, or t
  misc_feature (204)..(204): n is a, c, g, or t
  misc_feature (207)..(207): n is a, c, g, or t
ggnccngcnggnccnccnggncaracnggnccnccnggnccngcnggnccnccnggnwsnaarggngaymgnggncaracnggngaraarggnccngcnggnccnccnggnytnytnggnccnccnggnccnmgnggnytnccnggngaratgggnmgnccnggnccnccnggnccnccnggnccngcnggnaayccnggnccnwsn

SEQ ID NO: 1142 - DNA, 162 bp, Artificial Sequence
  hCol-CNA47 (alpha1(XXVI) THD2)
  misc_feature (3)..(3): n is a, c, g, or t
  misc_feature (6)..(6): n is a, c, g, or t
  misc_feature (9)..(9): n is a, c, g, or t
  misc_feature (12)..(12): n is a, c, g, or t
  misc_feature (15)..(15): n is a, c, g, or t
  misc_feature (18)..(18): n is a, c, g, or t
  misc_feature (21)..(21): n is a, c, g, or t
  misc_feature (24)..(24): n is a, c, g, or t
  misc_feature (27)..(27): n is a, c, g, or t
  misc_feature (30)..(30): n is a, c, g, or t
  misc_feature (33)..(33): n is a, c, g, or t
  misc_feature (36)..(36): n is a, c, g, or t
  misc_feature (39)..(39): n is a, c, g, or t
  misc_feature (42)..(42): n is a, c, g, or t
  misc_feature (45)..(45): n is a, c, g, or t
  misc_feature (48)..(48): n is a, c, g, or t
  misc_feature (51)..(51): n is a, c, g, or t
  misc_feature (54)..(54): n is a, c, g, or t
  misc_feature (57)..(57): n is a, c, g, or t
  misc_feature (60)..(60): n is a, c, g, or t
  misc_feature (63)..(63): n is a, c, g, or t
  misc_feature (66)..(66): n is a, c, g, or t
  misc_feature (69)..(69): n is a, c, g, or t
  misc_feature (72)..(72): n is a, c, g, or t
  misc_feature (75)..(75): n is a, c, g, or t
  misc_feature (78)..(78): n is a, c, g, or t
  misc_feature (81)..(81): n is a, c, g, or t
  misc_feature (84)..(84): n is a, c, g, or t
  misc_feature (87)..(87): n is a, c, g, or t
  misc_feature (93)..(93): n is a, c, g, or t
  misc_feature (96)..(96): n is a, c, g, or t
  misc_feature (99)..(99): n is a, c, g, or t
  misc_feature (102)..(102): n is a, c, g, or t
  misc_feature (108)..(108): n is a, c, g, or t
  misc_feature (111)..(111): n is a, c, g, or t
  misc_feature (114)..(114): n is a, c, g, or t
  misc_feature (117)..(117): n is a, c, g, or t
  misc_feature (120)..(120): n is a, c, g, or t
  misc_feature (123)..(123): n is a, c, g, or t
  misc_feature (126)..(126): n is a, c, g, or t
  misc_feature (129)..(129): n is a, c, g, or t
  misc_feature (135)..(135): n is a, c, g, or t
  misc_feature (138)..(138): n is a, c, g, or t
  misc_feature (141)..(141): n is a, c, g, or t
  misc_feature (147)..(147): n is a, c, g, or t
  misc_feature (156)..(156): n is a, c, g, or t
ggngtnccnggnccnmgnggnccnccnggnccnccnggnccnccnggnccnmgnggnccnccnggnccnccnggnacnccnggnwsncarggnytngcnggngarmgnggnacngtnggnccnwsnggngarccnggngtnaarggngargarggngaraar

SEQ ID NO: 1143 - DNA, 2982 bp, Artificial Sequence
  hCol-CNA48 (alpha1(XXVII) THD)
  misc_feature (3)..(3): n is a, c, g, or t
  misc_feature (6)..(6): n is a, c, g, or t
  misc_feature (9)..(9): n is a, c, g, or t
  misc_feature (12)..(12): n is a, c, g, or t
  misc_feature (15)..(15): n is a, c, g, or t
  misc_feature (21)..(21): n is a, c, g, or t
  misc_feature (30)..(30): n is a, c, g, or t
  misc_feature (33)..(33): n is a, c, g, or t
  misc_feature (36)..(36): n is a, c, g, or t
  misc_feature (39)..(39): n is a, c, g, or t
  misc_feature (42)..(42): n is a, c, g, or t
  misc_feature (45)..(45): n is a, c, g, or t
  misc_feature (48)..(48): n is a, c, g, or t
  misc_feature (51)..(51): n is a, c, g, or t
  misc_feature (54)..(54): n is a, c, g, or t
  misc_feature (57)..(57): n is a, c, g, or t
  misc_feature (60)..(60): n is a, c, g, or t
  misc_feature (63)..(63): n is a, c, g, or t
  misc_feature (66)..(66): n is a, c, g, or t
  misc_feature (72)..(72): n is a, c, g, or t
  misc_feature (75)..(75): n is a, c, g, or t
  misc_feature (78)..(78): n is a, c, g, or t
  misc_feature (81)..(81): n is a, c, g, or t
  misc_feature (84)..(84): n is a, c, g, or t
  misc_feature (87)..(87): n is a, c, g, or t
  misc_feature (90)..(90): n is a, c, g, or t
  misc_feature (93)..(93): n is a, c, g, or t
  misc_feature (96)..(96): n is a, c, g, or t
  misc_feature (99)..(99): n is a, c, g, or t
  misc_feature (102)..(102): n is a, c, g, or t
  misc_feature (105)..(105): n is a, c, g, or t
  misc_feature (111)..(111): n is a, c, g, or t
  misc_feature (117)..(117): n is a, c, g, or t
  misc_feature (120)..(120): n is a, c, g, or t
  misc_feature (123)..(123): n is a, c, g, or t
  misc_feature (126)..(126): n is a, c, g, or t
  misc_feature (129)..(129): n is a, c, g, or t
  misc_feature (132)..(132): n is a, c, g, or t
  misc_feature (135)..(135): n is a, c, g, or t
  misc_feature (138)..(138): n is a, c, g, or t
  misc_feature (141)..(141): n is a, c, g, or t
  misc_feature (147)..(147): n is a, c, g, or t
  misc_feature (156)..(156): n is a, c, g, or t
  misc_feature (162)..(162): n is a, c, g, or t
  misc_feature (165)..(165): n is a, c, g, or t
  misc_feature (168)..(168): n is a, c, g, or t
  misc_feature (171)..(171): n is a, c, g, or t
  misc_feature (174)..(174): n is a, c, g, or t
  misc_feature (177)..(177): n is a, c, g, or t
  misc_feature (183)..(183): n is a, c, g, or t
  misc_feature (192)..(192): n is a, c, g, or t
  misc_feature (195)..(195): n is a, c, g, or t
  misc_feature (201)..(201): n is a, c, g, or t
  misc_feature (210)..(210): n is a, c, g, or t
  misc_feature (213)..(213): n is a, c, g, or t
  misc_feature (216)..(216): n is a, c, g, or t
  misc_feature (219)..(219): n is a, c, g, or t
  misc_feature (222)..(222): n is a, c, g, or t
  misc_feature (225)..(225): n is a, c, g, or t
  misc_feature (228)..(228): n is a, c, g, or t
  misc_feature (234)..(234): n is a, c, g, or t
  misc_feature (237)..(237): n is a, c, g, or t
  misc_feature (240)..(240): n is a, c, g, or t
  misc_feature (243)..(243): n is a, c, g, or t
  misc_feature (246)..(246): n is a, c, g, or t
  misc_feature (249)..(249): n is a, c, g, or t
  misc_feature (255)..(255): n is a, c, g, or t
  misc_feature (264)..(264): n is a, c, g, or t
  misc_feature (270)..(270): n is a, c, g, or t
  misc_feature (273)..(273): n is a, c, g, or t
  misc_feature (276)..(276): n is a, c, g, or t
  misc_feature (279)..(279): n is a, c, g, or t
  misc_feature (282)..(282): n is a, c, g, or t
  misc_feature (288)..(288): n is a, c, g, or t
  misc_feature (291)..(291): n is a, c, g, or t
  misc_feature (300)..(300): n is a, c, g, or t
  misc_feature (306)..(306): n is a, c, g, or t
  misc_feature (309)..(309): n is a, c, g, or t
  misc_feature (312)..(312): n is a, c, g, or t
  misc_feature (318)..(318): n is a, c, g, or t
  misc_feature (321)..(321): n is a, c, g, or t
  misc_feature (324)..(324): n is a, c, g, or t
  misc_feature (327)..(327): n is a, c, g, or t
  misc_feature (330)..(330): n is a, c, g, or t
  misc_feature (336)..(336): n is a, c, g, or t
  misc_feature (342)..(342): n is a, c, g, or t
  misc_feature (345)..(345): n is a, c, g, or t
  misc_feature (348)..(348): n is a, c, g, or t
  misc_feature (354)..(354): n is a, c, g, or t
  misc_feature (357)..(357): n is a, c, g, or t
  misc_feature (360)..(360): n is a, c, g, or t
  misc_feature (363)..(363): n is a, c, g, or t
  misc_feature (366)..(366): n is a, c, g, or t
  misc_feature (369)..(369): n is a, c, g, or t
  misc_feature (372)..(372): n is a, c, g, or t
  misc_feature (378)..(378): n is a, c, g, or t
  misc_feature (381)..(381): n is a, c, g, or t
  misc_feature (384)..(384): n is a, c, g, or t
  misc_feature (390)..(390): n is a, c, g, or t
  misc_feature (393)..(393): n is a, c, g, or t
  misc_feature (396)..(396): n is a, c, g, or t
  misc_feature (399)..(399): n is a, c, g, or t
  misc_feature (408)..(408): n is a, c, g, or t
  misc_feature (411)..(411): n is a, c, g, or t
  misc_feature (414)..(414): n is a, c, g, or t
  misc_feature (417)..(417): n is a, c, g, or t
  misc_feature (420)..(420): n is a, c, g, or t
  misc_feature (426)..(426): n is a, c, g, or t
  misc_feature (429)..(429): n is a, c, g, or t
  misc_feature (432)..(432): n is a, c, g, or t
  misc_feature (435)..(435): n is a, c, g, or t
  misc_feature (438)..(438): n is a, c, g, or t
  misc_feature (444)..(444): n is a, c, g, or t
  misc_feature (450)..(450): n is a, c, g, or t
  misc_feature (453)..(453): n is a, c, g, or t
  misc_feature (456)..(456): n is a, c, g, or t
  misc_feature (459)..(459): n is a, c, g, or t
  misc_feature (462)..(462): n is a, c, g, or t
  misc_feature (465)..(465): n is a, c, g, or t
  misc_feature (468)..(468): n is a, c, g, or t
  misc_feature (471)..(471): n is a, c, g, or t
  misc_feature (477)..(477): n is a, c, g, or t
  misc_feature (480)..(480): n is a, c, g, or t
  misc_feature (489)..(489): n is a, c, g, or t
  misc_feature (495)..(495): n is a, c, g, or t
  misc_feature (498)..(498): n is a, c, g, or t
  misc_feature (504)..(504): n is a, c, g, or t
  misc_feature (507)..(507): n is a, c, g, or t
  misc_feature (510)..(510): n is a, c, g, or t
  misc_feature (516)..(516): n is a, c, g, or t
  misc_feature (522)..(522): n is a, c, g, or t
  misc_feature (525)..(525): n is a, c, g, or t
  misc_feature (528)..(528): n is a, c, g, or t
  misc_feature (531)..(531): n is a, c, g, or t
  misc_feature (534)..(534): n is a, c, g, or t
  misc_feature (537)..(537): n is a, c, g, or t
  misc_feature (543)..(543): n is a, c, g, or t
  misc_feature (549)..(549): n is a, c, g, or t
  misc_feature (552)..(552): n is a, c, g, or t
  misc_feature (558)..(558): n is a, c, g, or t
  misc_feature (561)..(561): n is a, c, g, or t
  misc_feature (564)..(564): n is a, c, g, or t
  misc_feature (567)..(567): n is a, c, g, or t
  misc_feature (570)..(570): n is a, c, g, or t
  misc_feature (573)..(573): n is a, c, g, or t
  misc_feature (576)..(576): n is a, c, g, or t
  misc_feature (579)..(579): n is a, c, g, or t
  misc_feature (582)..(582): n is a, c, g, or t
  misc_feature (585)..(585): n is a, c, g, or t
  misc_feature (588)..(588): n is a, c, g, or t
  misc_feature (591)..(591): n is a, c, g, or t
  misc_feature (597)..(597): n is a, c, g, or t
  misc_feature (603)..(603): n is a, c, g, or t
  misc_feature (606)..(606): n is a, c, g, or t
  misc_feature (609)..(609): n is a, c, g, or t
  misc_feature (612)..(612): n is a, c, g, or t
  misc_feature (615)..(615): n is a, c, g, or t
  misc_feature (618)..(618): n is a, c, g, or t
  misc_feature (624)..(624): n is a, c, g, or t
  misc_feature (630)..(630): n is a, c, g, or t
  misc_feature (633)..(633): n is a, c, g, or t
  misc_feature (636)..(636): n is a, c, g, or t
  misc_feature (642)..(642): n is a, c, g, or t
  misc_feature (651)..(651): n is a, c, g, or t
  misc_feature (654)..(654): n is a, c, g, or t
  misc_feature (660)..(660): n is a, c, g, or t
  misc_feature (663)..(663): n is a, c, g, or t
  misc_feature (666)..(666): n is a, c, g, or t
  misc_feature (669)..(669): n is a, c, g, or t
  misc_feature (675)..(675): n is a, c, g, or t
  misc_feature (678)..(678): n is a, c, g, or t
  misc_feature (681)..(681): n is a, c, g, or t
  misc_feature (687)..(687): n is a, c, g, or t
  misc_feature (696)..(696): n is a, c, g, or t
  misc_feature (705)..(705): n is a, c, g, or t
  misc_feature (708)..(708): n is a, c, g, or t
  misc_feature (711)..(711): n is a, c, g, or t
  misc_feature (714)..(714): n is a, c, g, or t
  misc_feature (717)..(717): n is a, c, g, or t
  misc_feature (720)..(720): n is a, c, g, or t
  misc_feature (723)..(723): n is a, c, g, or t
  misc_feature (729)..(729): n is a, c, g, or t
  misc_feature (732)..(732): n is a, c, g, or t
  misc_feature (741)..(741): n is a, c, g, or t
  misc_feature (750)..(750): n is a, c, g, or t
  misc_feature (753)..(753): n is a, c, g, or t
  misc_feature (759)..(759): n is a, c, g, or t
  misc_feature (762)..(762): n is a, c, g, or t
  misc_feature (765)..(765): n is a, c, g, or t
  misc_feature (768)..(768): n is a, c, g, or t
  misc_feature (774)..(774): n is a, c, g, or t
  misc_feature (777)..(777): n is a, c, g, or t
  misc_feature (780)..(780): n is a, c, g, or t
  misc_feature (783)..(783): n is a, c, g, or t
  misc_feature (786)..(786): n is a, c, g, or t
  misc_feature (792)..(792): n is a, c, g, or t
  misc_feature (795)..(795): n is a, c, g, or t
  misc_feature (798)..(798): n is a, c, g, or t
  misc_feature (801)..(801): n is a, c, g, or t
  misc_feature (804)..(804): n is a, c, g, or t
  misc_feature (810)..(810): n is a, c, g, or t
  misc_feature (813)..(813): n is a, c, g, or t
  misc_feature (822)..(822): n is a, c, g, or t
  misc_feature (825)..(825): n is a, c, g, or t
  misc_feature (831)..(831): n is a, c, g, or t
  misc_feature (837)..(837): n is a, c, g, or t
  misc_feature (840)..(840): n is a, c, g, or t
  misc_feature (843)..(843): n is a, c, g, or t
  misc_feature (846)..(846): n is a, c, g, or t
  misc_feature (849)..(849): n is a, c, g, or t
  misc_feature (852)..(852): n is a, c, g, or t
  misc_feature (858)..(858): n is a, c, g, or t
  misc_feature (864)..(864): n is a, c, g, or t
  misc_feature (867)..(867): n is a, c, g, or t
  misc_feature (876)..(876): n is a, c, g, or t
  misc_feature (879)..(879): n is a, c, g, or t
  misc_feature (882)..(882): n is a, c, g, or t
  misc_feature (885)..(885): n is a, c, g, or t
  misc_feature (894)..(894): n is a, c, g, or t
  misc_feature (897)..(897): n is a, c, g, or t
  misc_feature (903)..(903): n is a, c, g, or t
  misc_feature (912)..(912): n is a, c, g, or t
  misc_feature (918)..(918): n is a, c, g, or t
  misc_feature (921)..(921): n is a, c, g, or t
  misc_feature (924)..(924): n is a, c, g, or t
  misc_feature (927)..(927): n is a, c, g, or t
  misc_feature (930)..(930): n is a, c, g, or t
  misc_feature (933)..(933): n is a, c, g, or t
  misc_feature (936)..(936): n is a, c, g, or t
  misc_feature (939)..(939): n is a, c, g, or t
  misc_feature (942)..(942): n is a, c, g, or t
  misc_feature (945)..(945): n is a, c, g, or t
  misc_feature (948)..(948): n is a, c, g, or t
  misc_feature (954)..(954): n is a, c, g, or t
  misc_feature (957)..(957): n is a, c, g, or t
  misc_feature (960)..(960): n is a, c, g, or t
  misc_feature (966)..(966): n is a, c, g, or t
  misc_feature (975)..(975): n is a, c, g, or t
  misc_feature (978)..(978): n is a, c, g, or t
  misc_feature (984)..(984): n is a, c, g, or t
  misc_feature (987)..(987): n is a, c, g, or t
  misc_feature (990)..(990): n is a, c, g, or t
  misc_feature (993)..(993): n is a, c, g, or t
  misc_feature (996)..(996): n is a, c, g, or t
  misc_feature (999)..(999): n is a, c, g, or t
  misc_feature (1002)..(1002): n is a, c, g, or t
  misc_feature (1005)..(1005): n is a, c, g, or t
  misc_feature (1011)..(1011): n is a, c, g, or t
  misc_feature (1017)..(1017): n is a, c, g, or t
  misc_feature (1020)..(1020): n is a, c, g, or t
  misc_feature (1023)..(1023): n is a, c, g, or t
  misc_feature (1029)..(1029): n is a, c, g, or t
  misc_feature (1035)..(1035): n is a, c, g, or t
  misc_feature (1038)..(1038): n is a, c, g, or t
  misc_feature (1041)..(1041): n is a, c, g, or t
  misc_feature (1044)..(1044): n is a, c, g, or t
  misc_feature (1047)..(1047): n is a, c, g, or t
  misc_feature (1050)..(1050): n is a, c, g, or t
  misc_feature (1056)..(1056): n is a, c, g, or t
  misc_feature (1059)..(1059): n is a, c, g, or t
  misc_feature (1065)..(1065): n is a, c, g, or t
  misc_feature (1071)..(1071): n is a, c, g, or t
  misc_feature (1074)..(1074): n is a, c, g, or t
  misc_feature (1080)..(1080): n is a, c, g, or t
  misc_feature (1083)..(1083): n is a, c, g, or t
  misc_feature (1086)..(1086): n is a, c, g, or t
  misc_feature (1089)..(1089): n is a, c, g, or t
  misc_feature (1092)..(1092): n is a, c, g, or t
  misc_feature (1095)..(1095): n is a, c, g, or t
  misc_feature (1098)..(1098): n is a, c, g, or t
  misc_feature (1101)..(1101): n is a, c, g, or t
  misc_feature (1110)..(1110): n is a, c, g, or t
  misc_feature (1119)..(1119): n is a, c, g, or t
  misc_feature (1128)..(1128): n is a, c, g, or t
  misc_feature (1131)..(1131): n is a, c, g, or t
  misc_feature (1134)..(1134): n is a, c, g, or t
  misc_feature (1137)..(1137): n is a, c, g, or t
  misc_feature (1143)..(1143): n is a, c, g, or t
  misc_feature (1146)..(1146): n is a, c, g, or t
  misc_feature (1152)..(1152): n is a, c, g, or t
  misc_feature (1155)..(1155): n is a, c, g, or t
  misc_feature (1164)..(1164): n is a, c, g, or t
  misc_feature (1170)..(1170): n is a, c, g, or t
  misc_feature (1173)..(1173): n is a, c, g, or t
  misc_feature (1182)..(1182): n is a, c, g, or t
  misc_feature (1185)..(1185): n is a, c, g, or t
  misc_feature (1188)..(1188): n is a, c, g, or t
  misc_feature (1191)..(1191): n is a, c, g, or t
  misc_feature (1194)..(1194): n is a, c, g, or t
  misc_feature (1197)..(1197): n is a, c, g, or t
  misc_feature (1200)..(1200): n is a, c, g, or t
  misc_feature (1203)..(1203): n is a, c, g, or t
  misc_feature (1209)..(1209): n is a, c, g, or t
  misc_feature (1212)..(1212): n is a, c, g, or t
  misc_feature (1218)..(1218): n is a, c, g, or t
  misc_feature (1224)..(1224): n is a, c, g, or t
  misc_feature (1227)..(1227): n is a, c, g, or t
  misc_feature (1233)..(1233): n is a, c, g, or t
  misc_feature (1236)..(1236): n is a, c, g, or t
  misc_feature (1239)..(1239): n is a, c, g, or t
  misc_feature (1245)..(1245): n is a, c, g, or t
  misc_feature (1248)..(1248): n is a, c, g, or t
  misc_feature (1251)..(1251): n is a, c, g, or t
  misc_feature (1254)..(1254): n is a, c, g, or t
  misc_feature (1260)..(1260): n is a, c, g, or t
  misc_feature (1263)..(1263): n is a, c, g, or t
  misc_feature (1266)..(1266): n is a, c, g, or t
  misc_feature (1272)..(1272): n is a, c, g, or t
  misc_feature (1275)..(1275): n is a, c, g, or t
  misc_feature (1278)..(1278): n is a, c, g, or t
  misc_feature (1281)..(1281): n is a, c, g, or t
  misc_feature (1284)..(1284): n is a, c, g, or t
  misc_feature (1287)..(1287): n is a, c, g, or t
  misc_feature (1290)..(1290): n is a, c, g, or t
  misc_feature (1293)..(1293): n is a, c, g, or t
  misc_feature (1296)..(1296): n is a, c, g, or t
  misc_feature (1299)..(1299): n is a, c, g, or t
  misc_feature (1305)..(1305): n is a, c, g, or t
  misc_feature (1308)..(1308): n is a, c, g, or t
  misc_feature (1311)..(1311): n is a, c, g, or t
  misc_feature (1317)..(1317): n is a, c, g, or t
  misc_feature (1320)..(1320): n is a, c, g, or t
  misc_feature (1323)..(1323): n is a, c, g, or t
  misc_feature (1326)..(1326): n is a, c, g, or t
  misc_feature (1329)..(1329): n is a, c, g, or t
  misc_feature (1332)..(1332): n is a, c, g, or t
  misc_feature (1335)..(1335): n is a, c, g, or t
  misc_feature (1338)..(1338): n is a, c, g, or t
  misc_feature (1344)..(1344): n is a, c, g, or t
  misc_feature (1347)..(1347): n is a, c, g, or t
  misc_feature (1350)..(1350): n is a, c, g, or t
  misc_feature (1353)..(1353): n is a, c, g, or t
  misc_feature (1362)..(1362): n is a, c, g, or t
  misc_feature (1365)..(1365): n is a, c, g, or t
  misc_feature (1368)..(1368): n is a, c, g, or t
  misc_feature (1371)..(1371): n is a, c, g, or t
  misc_feature (1374)..(1374): n is a, c, g, or t
  misc_feature (1380)..(1380): n is a, c, g, or t
  misc_feature (1383)..(1383): n is a, c, g, or t
  misc_feature (1386)..(1386): n is a, c, g, or t
  misc_feature (1389)..(1389): n is a, c, g, or t
  misc_feature (1392)..(1392): n is a, c, g, or t
  misc_feature (1398)..(1398): n is a, c, g, or t
  misc_feature (1401)..(1401): n is a, c, g, or t
  misc_feature (1404)..(1404): n is a, c, g, or t
  misc_feature (1407)..(1407): n is a, c, g, or t
  misc_feature (1410)..(1410): n is a, c, g, or t
  misc_feature (1413)..(1413): n is a, c, g, or t
  misc_feature (1416)..(1416): n is a, c, g, or t
  misc_feature (1425)..(1425): n is a, c, g, or t
  misc_feature (1428)..(1428): n is a, c, g, or t
  misc_feature (1431)..(1431): n is a, c, g, or t
  misc_feature (1434)..(1434): n is a, c, g, or t
  misc_feature (1440)..(1440): n is a, c, g, or t
  misc_feature (1443)..(1443): n is a, c, g, or t
  misc_feature (1449)..(1449): n is a, c, g, or t
  misc_feature (1452)..(1452): n is a, c, g, or t
  misc_feature (1455)..(1455): n is a, c, g, or t
  misc_feature (1458)..(1458): n is a, c, g, or t
  misc_feature (1461)..(1461): n is a, c, g, or t
  misc_feature (1467)..(1467): n is a, c, g, or t
  misc_feature (1470)..(1470): n is a, c, g, or t
  misc_feature (1476)..(1476): n is a, c, g, or t
  misc_feature (1479)..(1479): n is a, c, g, or t
  misc_feature (1482)..(1482): n is a, c, g, or t
  misc_feature (1485)..(1485): n is a, c, g, or t
  misc_feature (1488)..(1488): n is a, c, g, or t
  misc_feature (1491)..(1491): n is a, c, g, or t
  misc_feature (1494)..(1494): n is a, c, g, or t
  misc_feature (1497)..(1497): n is a, c, g, or t
  misc_feature (1500)..(1500): n is a, c, g, or t
  misc_feature (1506)..(1506): n is a, c, g, or t
  misc_feature (1509)..(1509): n is a, c, g, or t
  misc_feature (1512)..(1512): n is a, c, g, or t
  misc_feature (1515)..(1515): n is a, c, g, or t
  misc_feature (1521)..(1521): n is a, c, g, or t
  misc_feature (1524)..(1524): n is a, c, g, or t
  misc_feature (1527)..(1527): n is a, c, g, or t
  misc_feature (1533)..(1533): n is a, c, g, or t
  misc_feature (1536)..(1536): n is a, c, g, or t
  misc_feature (1542)..(1542): n is a, c, g, or t
  misc_feature (1545)..(1545): n is a, c, g, or t
  misc_feature (1551)..(1551): n is a, c, g, or t
  misc_feature (1554)..(1554): n is a, c, g, or t
  misc_feature (1557)..(1557): n is a, c, g, or t
  misc_feature (1560)..(1560): n is a, c, g, or t
  misc_feature (1569)..(1569): n is a, c, g, or t
  misc_feature (1572)..(1572): n is a, c, g, or t
  misc_feature (1578)..(1578): n is a, c, g, or t
  misc_feature (1581)..(1581): n is a, c, g, or t
  misc_feature (1584)..(1584): n is a, c, g, or t
  misc_feature (1587)..(1587): n is a, c, g, or t
  misc_feature (1590)..(1590): n is a, c, g, or t
  misc_feature (1593)..(1593): n is a, c, g, or t
  misc_feature (1596)..(1596): n is a, c, g, or t
  misc_feature (1602)..(1602): n is a, c, g, or t
  misc_feature (1605)..(1605): n is a, c, g, or t
  misc_feature (1608)..(1608): n is a, c, g, or t
  misc_feature (1611)..(1611): n is a, c, g, or t
  misc_feature (1614)..(1614): n is a, c, g, or t
  misc_feature (1620)..(1620): n is a, c, g, or t
  misc_feature (1623)..(1623): n is a, c, g, or t
  misc_feature (1632)..(1632): n is a, c, g, or t
  misc_feature (1638)..(1638): n is a, c, g, or t
  misc_feature (1641)..(1641): n is a, c, g, or t
  misc_feature (1644)..(1644): n is a, c, g, or t
  misc_feature (1647)..(1647): n is a, c, g, or t
  misc_feature (1650)..(1650): n is a, c, g, or t
  misc_feature (1653)..(1653): n is a, c, g, or t
  misc_feature (1656)..(1656): n is a, c, g, or t
  misc_feature (1659)..(1659): n is a, c, g, or t
  misc_feature (1668)..(1668): n is a, c, g, or t
  misc_feature (1671)..(1671): n is a, c, g, or t
  misc_feature (1677)..(1677): n is a, c, g, or t
  misc_feature (1683)..(1683): n is a, c, g, or t
  misc_feature (1686)..(1686): n is a, c, g, or t
  misc_feature (1692)..(1692): n is a, c, g, or t
  misc_feature (1695)..(1695): n is a, c, g, or t
  misc_feature (1698)..(1698): n is a, c, g, or t
  misc_feature (1704)..(1704): n is a, c, g, or t
  misc_feature (1710)..(1710): n is a, c, g, or t
  misc_feature (1713)..(1713): n is a, c, g, or t
  misc_feature (1716)..(1716): n is a, c, g, or t
  misc_feature (1722)..(1722): n is a, c, g, or t
  misc_feature (1725)..(1725): n is a, c, g, or t
  misc_feature (1731)..(1731): n is a, c, g, or t
  misc_feature (1734)..(1734): n is a, c, g, or t
  misc_feature (1740)..(1740): n is a, c, g, or t
  misc_feature (1746)..(1746): n is a, c, g, or t
  misc_feature (1749)..(1749): n is a, c, g, or t
  misc_feature (1755)..(1755): n is a, c, g, or t
  misc_feature (1758)..(1758): n is a, c, g, or t
  misc_feature (1761)..(1761): n is a, c, g, or t
  misc_feature (1767)..(1767): n is a, c, g, or t
  misc_feature (1776)..(1776): n is a, c, g, or t
  misc_feature (1785)..(1785): n is a, c, g, or t
  misc_feature (1794)..(1794): n is a, c, g, or t
  misc_feature (1797)..(1797): n is a, c, g, or t
  misc_feature (1803)..(1803): n is a, c, g, or t
  misc_feature (1812)..(1812): n is a, c, g, or t
  misc_feature (1815)..(1815): n is a, c, g, or t
  misc_feature (1818)..(1818): n is a, c, g, or t
  misc_feature (1821)..(1821): n is a, c, g, or t
  misc_feature (1824)..(1824): n is a, c, g, or t
  misc_feature (1827)..(1827): n is a, c, g, or t
  misc_feature (1830)..(1830): n is a, c, g, or t
  misc_feature (1833)..(1833): n is a, c, g, or t
  misc_feature (1836)..(1836): n is a, c, g, or t
  misc_feature (1839)..(1839): n is a, c, g, or t
  misc_feature (1842)..(1842): n is a, c, g, or t
  misc_feature (1845)..(1845): n is a, c, g, or t
  misc_feature (1848)..(1848): n is a, c, g, or t
  misc_feature (1851)..(1851): n is a, c, g, or t
  misc_feature (1857)..(1857): n is a, c, g, or t
  misc_feature (1863)..(1863): n is a, c, g, or t
  misc_feature (1866)..(1866): n is a, c, g, or t
  misc_feature (1875)..(1875): n is a, c, g, or t
  misc_feature (1884)..(1884): n is a, c, g, or t
  misc_feature (1887)..(1887): n is a, c, g, or t
  misc_feature (1890)..(1890): n is a, c, g, or t
  misc_feature (1893)..(1893): n is a, c, g, or t
  misc_feature (1896)..(1896): n is a, c, g, or t
  misc_feature (1902)..(1902): n is a, c, g, or t
  misc_feature (1905)..(1905): n is a, c, g, or t
  misc_feature (1911)..(1911): n is a, c, g, or t
  misc_feature (1920)..(1920): n is a, c, g, or t
  misc_feature (1926)..(1926): n is a, c, g, or t
  misc_feature (1929)..(1929): n is a, c, g, or t
  misc_feature (1938)..(1938): n is a, c, g, or t
  misc_feature (1941)..(1941): n is a, c, g, or t
  misc_feature (1944)..(1944): n is a, c, g, or t
  misc_feature (1947)..(1947): n is a, c, g, or t
  misc_feature (1953)..(1953): n is a, c, g, or t
  misc_feature (1956)..(1956): n is a, c, g, or t
  misc_feature (1959)..(1959): n is a, c, g, or t
  misc_feature (1962)..(1962): n is a, c, g, or t
  misc_feature (1965)..(1965): n is a, c, g, or t
  misc_feature (1968)..(1968): n is a, c, g, or t
  misc_feature (1971)..(1971): n is a, c, g, or t
  misc_feature (1974)..(1974): n is a, c, g, or t
  misc_feature (1977)..(1977): n is a, c, g, or t
  misc_feature (1983)..(1983): n is a, c, g, or t
  misc_feature (1986)..(1986): n is a, c, g, or t
  misc_feature (1989)..(1989): n is a, c, g, or t
  misc_feature (1992)..(1992): n is a, c, g, or t
  misc_feature (1995)..(1995): n is a, c, g, or t
  misc_feature (1998)..(1998): n is a, c, g, or t
  misc_feature (2001)..(2001): n is a, c, g, or t
  misc_feature (2004)..(2004): n is a, c, g, or t
  misc_feature (2007)..(2007): n is a, c, g, or t
  misc_feature (2010)..(2010): n is a, c, g, or t
  misc_feature (2013)..(2013): n is a, c, g, or t
  misc_feature (2016)..(2016): n is a, c, g, or t
  misc_feature (2019)..(2019): n is a, c, g, or t
  misc_feature (2022)..(2022): n is a, c, g, or t
  misc_feature (2028)..(2028): n is a, c, g, or t
  misc_feature (2031)..(2031): n is a, c, g, or t
  misc_feature (2037)..(2037): n is a, c, g, or t
  misc_feature (2043)..(2043): n is a, c, g, or t
  misc_feature (2046)..(2046): n is a, c, g, or t
  misc_feature (2049)..(2049): n is a, c, g, or t
  misc_feature (2052)..(2052): n is a, c, g, or t
  misc_feature (2055)..(2055): n is a, c, g, or t
  misc_feature (2064)..(2064): n is a, c, g, or t
  misc_feature (2073)..(2073): n is a, c, g, or t
  misc_feature (2079)..(2079): n is a, c, g, or t
  misc_feature (2082)..(2082): n is a, c, g, or t
  misc_feature (2085)..(2085): n is a, c, g, or t
  misc_feature (2088)..(2088): n is a, c, g, or t
  misc_feature (2091)..(2091): n is a, c, g, or t
  misc_feature (2094)..(2094): n is a, c, g, or t
  misc_feature (2097)..(2097): n is a, c, g, or t
  misc_feature (2100)..(2100): n is a, c, g, or t
  misc_feature (2103)..(2103): n is a, c, g, or t
  misc_feature (2109)..(2109): n is a, c, g, or t
  misc_feature (2118)..(2118): n is a, c, g, or t
  misc_feature (2127)..(2127): n is a, c, g, or t
  misc_feature (2136)..(2136): n is a, c, g, or t
  misc_feature (2142)..(2142): n is a, c, g, or t
  misc_feature (2148)..(2148): n is a, c, g, or t
  misc_feature (2151)..(2151): n is a, c, g, or t
  misc_feature (2154)..(2154): n is a, c, g, or t
  misc_feature (2157)..(2157): n is a, c, g, or t
  misc_feature (2160)..(2160): n is a, c, g, or t
  misc_feature (2163)..(2163): n is a, c, g, or t
  misc_feature (2166)..(2166): n is a, c, g, or t
  misc_feature (2172)..(2172): n is a, c, g, or t
  misc_feature (2175)..(2175): n is a, c, g, or t
  misc_feature (2178)..(2178): n is a, c, g, or t
  misc_feature (2181)..(2181): n is a, c, g, or t
  misc_feature (2184)..(2184): n is a, c, g, or t
  misc_feature (2190)..(2190): n is a, c, g, or t
  misc_feature (2193)..(2193): n is a, c, g, or t
  misc_feature (2199)..(2199): n is a, c, g, or t
  misc_feature (2202)..(2202): n is a, c, g, or t
  misc_feature (2208)..(2208): n is a, c, g, or t
  misc_feature (2211)..(2211): n is a, c, g, or t
  misc_feature (2217)..(2217): n is a, c, g, or t
  misc_feature (2220)..(2220): n is a, c, g, or t
  misc_feature (2226)..(2226): n is a, c, g, or t
  misc_feature (2229)..(2229): n is a, c, g, or t
  misc_feature (2238)..(2238): n is a, c, g, or t
  misc_feature (2241)..(2241): n is a, c, g, or t
  misc_feature (2247)..(2247): n is a, c, g, or t
  misc_feature (2250)..(2250): n is a, c, g, or t
  misc_feature (2253)..(2253): n is a, c, g, or t
  misc_feature (2256)..(2256): n is a, c, g, or t
  misc_feature (2262)..(2262): n is a, c, g, or t
  misc_feature (2265)..(2265): n is a, c, g, or t
  misc_feature (2274)..(2274): n is a, c, g, or t
  misc_feature (2280)..(2280): n is a, c, g, or t
  misc_feature (2283)..(2283): n is a, c, g, or t
  misc_feature (2289)..(2289): n is a, c, g, or t
  misc_feature (2292)..(2292): n is a, c, g, or t
  misc_feature (2295)..(2295): n is a, c, g, or t
  misc_feature (2298)..(2298): n is a, c, g, or t
  misc_feature (2301)..(2301): n is a, c, g, or t
  misc_feature (2307)..(2307): n is a, c, g, or t
  misc_feature (2310)..(2310): n is a, c, g, or t
  misc_feature (2313)..(2313): n is a, c, g, or t
  misc_feature (2319)..(2319): n is a, c, g, or t
  misc_feature (2322)..(2322): n is a, c, g, or t
  misc_feature (2328)..(2328): n is a, c, g, or t
  misc_feature (2331)..(2331): n is a, c, g, or t
  misc_feature (2337)..(2337): n is a, c, g, or t
  misc_feature (2340)..(2340): n is a, c, g, or t
  misc_feature (2346)..(2346): n is a, c, g, or t
  misc_feature (2355)..(2355): n is a, c, g, or t
  misc_feature (2361)..(2361): n is a, c, g, or t
  misc_feature (2364)..(2364): n is a, c, g, or t
  misc_feature (2367)..(2367): n is a, c, g, or t
  misc_feature (2370)..(2370): n is a, c, g, or t
  misc_feature (2373)..(2373): n is a, c, g, or t
  misc_feature (2376)..(2376): n is a, c, g, or t
  misc_feature (2379)..(2379): n is a, c, g, or t
  misc_feature (2382)..(2382): n is a, c, g, or t
  misc_feature (2385)..(2385): n is a, c, g, or t
  misc_feature (2391)..(2391): n is a, c, g, or t
  misc_feature (2394)..(2394): n is a, c, g, or t
  misc_feature (2400)..(2400): n is a, c, g, or t
  misc_feature (2403)..(2403): n is a, c, g, or t
  misc_feature (2406)..(2406): n is a, c, g, or t
  misc_feature (2409)..(2409): n is a, c, g, or t
  misc_feature (2412)..(2412): n is a, c, g, or t
  misc_feature (2415)..(2415): n is a, c, g, or t
  misc_feature (2418)..(2418): n is a, c, g, or t
  misc_feature (2421)..(2421): n is a, c, g, or t
  misc_feature (2424)..(2424): n is a, c, g, or t
  misc_feature (2427)..(2427): n is a, c, g, or t
  misc_feature (2430)..(2430): n is a, c, g, or t
  misc_feature (2436)..(2436): n is a, c, g, or t
  misc_feature (2439)..(2439): n is a, c, g, or t
  misc_feature (2445)..(2445): n is a, c, g, or t
  misc_feature (2451)..(2451): n is a, c, g, or t
  misc_feature (2454)..(2454): n is a, c, g, or t
  misc_feature (2457)..(2457): n is a, c, g, or t
  misc_feature (2463)..(2463): n is a, c, g, or t
  misc_feature (2466)..(2466): n is a, c, g, or t
  misc_feature (2469)..(2469): n is a, c, g, or t
  misc_feature (2472)..(2472): n is a, c, g, or t
  misc_feature (2475)..(2475): n is a, c, g, or t
  misc_feature (2481)..(2481): n is a, c, g, or t
  misc_feature (2487)..(2487): n is a, c, g, or t
  misc_feature (2490)..(2490): n is a, c, g, or t
  misc_feature (2499)..(2499): n is a, c, g, or t
  misc_feature (2508)..(2508): n is a, c, g, or t
  misc_feature (2517)..(2517): n is a, c, g, or t
  misc_feature (2523)..(2523): n is a, c, g, or t
  misc_feature (2526)..(2526): n is a, c, g, or t
  misc_feature (2529)..(2529): n is a, c, g, or t
  misc_feature (2535)..(2535): n is a, c, g, or t
  misc_feature (2538)..(2538): n is a, c, g, or t
  misc_feature (2541)..(2541): n is a, c, g, or t
  misc_feature (2544)..(2544): n is a, c, g, or t
  misc_feature (2550)..(2550): n is a, c, g, or t
  misc_feature (2553)..(2553): n is a, c, g, or t
  misc_feature (2559)..(2559): n is a, c, g, or t
  misc_feature (2562)..(2562): n is a, c, g, or t
  misc_feature (2565)..(2565): n is a, c, g, or t
  misc_feature (2568)..(2568): n is a, c, g, or t
  misc_feature (2571)..(2571): n is a, c, g, or t
  misc_feature (2574)..(2574): n is a, c, g, or t
  misc_feature (2577)..(2577): n is a, c, g, or t
  misc_feature (2580)..(2580): n is a, c, g, or t
  misc_feature (2583)..(2583): n is a, c, g, or t
  misc_feature (2589)..(2589): n is a, c, g, or t
  misc_feature (2592)..(2592): n is a, c, g, or t
  misc_feature (2595)..(2595): n is a, c, g, or t
  misc_feature (2598)..(2598): n is a, c, g, or t
  misc_feature (2607)..(2607): n is a, c, g, or t
  misc_feature (2613)..(2613): n is a, c, g, or t
  misc_feature (2616)..(2616): n is a, c, g, or t
  misc_feature (2619)..(2619): n is a, c, g, or t
  misc_feature (2622)..(2622): n is a, c, g, or t
  misc_feature (2625)..(2625): n is a, c, g, or t
  misc_feature (2631)..(2631): n is a, c, g, or t
  misc_feature (2634)..(2634): n is a, c, g, or t
  misc_feature (2637)..(2637): n is a, c, g, or t
  misc_feature (2640)..(2640): n is a, c, g, or t
  misc_feature (2643)..(2643): n is a, c, g, or t
  misc_feature (2649)..(2649): n is a, c, g, or t
  misc_feature (2652)..(2652): n is a, c, g, or t
  misc_feature (2655)..(2655): n is a, c, g, or t
  misc_feature (2661)..(2661): n is a, c, g, or t
  misc_feature (2664)..(2664): n is a, c, g, or t
  misc_feature (2667)..(2667): n is a, c, g, or t
  misc_feature (2670)..(2670): n is a, c, g, or t
  misc_feature (2673)..(2673): n is a, c, g, or t
  misc_feature (2676)..(2676): n is a, c, g, or t
  misc_feature (2679)..(2679): n is a, c, g, or t
  misc_feature (2688)..(2688): n is a, c, g, or t
  misc_feature (2694)..(2694): n is a, c, g, or t
  misc_feature (2697)..(2697): n is a, c, g, or t
  misc_feature (2700)..(2700): n is a, c, g, or t
  misc_feature (2706)..(2706): n is a, c, g, or t
  misc_feature (2712)..(2712): n is a, c, g, or t
  misc_feature (2715)..(2715): n is a, c, g, or t
  misc_feature (2721)..(2721): n is a, c, g, or t
  misc_feature (2724)..(2724): n is a, c, g, or t
  misc_feature (2733)..(2733): n is a, c, g, or t
  misc_feature (2739)..(2739): n is a, c, g, or t
  misc_feature (2742)..(2742): n is a, c, g, or t
  misc_feature (2748)..(2748): n is a, c, g, or t
  misc_feature (2751)..(2751): n is a, c, g, or t
  misc_feature (2754)..(2754): n is a, c, g, or t
  misc_feature (2760)..(2760): n is a, c, g, or t
  misc_feature (2763)..(2763): n is a, c, g, or t
  misc_feature (2769)..(2769): n is a, c, g, or t
  misc_feature (2772)..(2772): n is a, c, g, or t
  misc_feature (2775)..(2775): n is a, c, g, or t
  misc_feature (2778)..(2778): n is a, c, g, or t
  misc_feature (2787)..(2787): n is a, c, g, or t
  misc_feature (2796)..(2796): n is a, c, g, or t
  misc_feature (2805)..(2805): n is a, c, g, or t
  misc_feature (2808)..(2808): n is a, c, g, or t
  misc_feature (2811)..(2811): n is a, c, g, or t
  misc_feature (2814)..(2814): n is a, c, g, or t
  misc_feature (2817)..(2817): n is a, c, g, or t
  misc_feature (2820)..(2820): n is a, c, g, or t
  misc_feature (2823)..(2823): n is a, c, g, or t
  misc_feature (2826)..(2826): n is a, c, g, or t
  misc_feature (2832)..(2832): n is a, c, g, or t
  misc_feature (2841)..(2841): n is a, c, g, or t
  misc_feature (2847)..(2847): n is a, c, g, or t
  misc_feature (2850)..(2850): n is a, c, g, or t
  misc_feature (2853)..(2853): n is a, c, g, or t
  misc_feature (2856)..(2856): n is a, c, g, or t
  misc_feature (2859)..(2859): n is a, c, g, or t
  misc_feature (2865)..(2865): n is a, c, g, or t
  misc_feature (2868)..(2868): n is a, c, g, or t
  misc_feature (2871)..(2871): n is a, c, g, or t
  misc_feature (2874)..(2874): n is a, c, g, or t
  misc_feature (2877)..(2877): n is a, c, g, or t
  misc_feature (2880)..(2880): n is a, c, g, or t
  misc_feature (2883)..(2883): n is a, c, g, or t
  misc_feature (2886)..(2886): n is a, c, g, or t
  misc_feature (2889)..(2889): n is a, c, g, or t
  misc_feature (2895)..(2895): n is a, c, g, or t
  misc_feature (2904)..(2904): n is a, c, g, or t
  misc_feature (2907)..(2907): n is a, c, g, or t
  misc_feature (2910)..(2910): n is a, c, g, or t
  misc_feature (2913)..(2913): n is a, c, g, or t
  misc_feature (2922)..(2922): n is a, c, g, or t
  misc_feature (2925)..(2925): n is a, c, g, or t
  misc_feature (2931)..(2931): n is a, c, g, or t
  misc_feature (2934)..(2934): n is a, c, g, or t
  misc_feature (2937)..(2937): n is a, c, g, or t
  misc_feature (2940)..(2940): n is a, c, g, or t
  misc_feature (2943)..(2943): n is a, c, g, or t
  misc_feature (2946)..(2946): n is a, c, g, or t
  misc_feature (2949)..(2949): n is a, c, g, or t
  misc_feature (2952)..(2952): n is a, c, g, or t
  misc_feature (2955)..(2955): n is a, c, g, or t
  misc_feature (2958)..(2958): n is a, c, g, or t
  misc_feature (2961)..(2961): n is a, c, g, or t
  misc_feature (2964)..(2964): n is a, c, g, or t
  misc_feature (2967)..(2967): n is a, c, g, or t
  misc_feature (2970)..(2970): n is a, c, g, or t
  misc_feature (2973)..(2973): n is a, c, g, or t
  misc_feature (2976)..(2976): n is a, c, g, or t
  misc_feature (2979)..(2979): n is a, c, g, or t
  misc_feature (2982)..(2982): n is a, c, g, or t
ggnccnccnggnccnaarggngaytgyggnytnccnggnccnccnggnytnccnggnytnccnggnathccnggngcnmgnggnccnmgnggnccnccnggnccntayggnaayccnggnytnccnggnccnccnggngcnaarggncaraarggngayccnggnytnwsnccnggnaargcncaygayggngcnaarggngayatgggnytnccnggnytnwsnggnaayccnggnccnccnggnmgnaarggncayaarggntayccnggnccngcnggncayccnggngarcarggncarccnggnccngarggnwsnccnggngcnaarggntayccnggnmgncarggnytnccnggnccngtnggngayccnggnccnaarggnwsnmgnggntayathggnytnccnggnytnttyggnytnccnggnwsngayggngarmgnggnytnccnggngtnccnggnaarmgnggnaaratgggnatgccnggnttyccnggngtnttyggngarmgnggnccnccnggnytngayggnaayccnggngarytnggnytnccnggnccnccnggngtnccnggnytnathggngayytnggngtnytnggnccnathggntayccnggnccnaarggnatgaarggnytnatgggnwsngtnggngarccnggnytnaarggngayaarggngarcarggngtnccnggngtnwsnggngayccnggnttycarggngayaarggnwsncarggnytnccnggnttyccnggngcnmgnggnaarccnggnccnytnggnaargtnggngayaarggnwsnathggnttyccnggnccnccnggnccngarggnttyccnggngayathggnccnccnggngayaayggnccngarggnatgaarggnaarccnggngcnmgnggnytnccnggnccnmgnggncarytnggnccngarggngaygarggnccnatgggnccnccnggngcnccnggnytngarggncarccnggnmgnaarggnttyccnggnmgnccnggnytngayggngtnaarggngarccnggngayccnggnmgnccnggnccngtnggngarcarggnttyatgggnttyathggnytngtnggngarccnggnathgtnggngaraarggngaymgnggnatgatgggnccnccnggngtnccnggnccnaarggnwsnatgggncayccnggnatgccnggnggnatgggnacnccnggngarccnggnccncarggnccnccnggnwsnmgnggnccnccnggnatgmgnggngcnaarggnmgnmgnggnccnmgnggnccngayggnccngcnggngarcarggnwsnmgnggnytnaarggnccnccnggnccncarggnmgnccnggnmgnccnggncarcarggngtngcnggngarmgnggncayytnggnwsnmgnggnttyccnggnathccnggnccnwsnggnccnccnggnacnaarggnytnccnggngarccnggnccncarggnccncarggnccnathggnccnccnggngaratgggnccnaarggnccnccnggngcngtnggngarccnggnytnccnggngargcnggnatgaarggngayytnggnccnytnggnacnccnggngarcarggnytnathggncarmgnggngarccnggnytngarggngaywsnggnccnatgggnccngayggnytnaarggngaymgnggngayccnggnccngayggngarcayggngaraarggncargarggnytnatgggngargayggnccnccnggnccnccnggngtnacnggngtnmgnggnccngarggnaarwsnggnaarcarggngaraarggnmgnacnggngcnaarggngcnaarggntaycarggncarytnggngaratgggngtnccnggngayccnggnccnccnggnacnccnggnccnaarggnwsnmgnggnwsnytnggnccnacnggngcnccnggnmgnatgggngcncarggngarccnggnytngcnggntaygayggncayaarggnathgtnggnccnytnggnccnccnggnccnaarggngaraarggngarcarggngargayggnaargcngarggnccnccnggnccnccnggngaymgnggnccngtnggngaymgnggngaymgnggngarccnggngayccnggntayccnggncargarggngtncarggnytnmgnggnaarccnggncarcarggncarccnggncayccnggnccnmgnggntggccnggnccnaarggnwsnaarggngcngarggnccnaarggnaarcarggnaargcnggngcnccnggnmgnmgnggngtncarggnytncarggnytnccnggnccnmgnggngtngtnggnmgncarggnytngarggnathgcnggnccngayggnytnccnggnmgngayggncargcnggncarcarggngarcarggngaygayggngayccnggnccnatgggnccngcnggnaarmgnggnaayccnggngtngcnggnytnccnggngcncarggnccnccnggnttyaarggngarwsnggnytnccnggncarytnggnccnccnggnaarmgnggnacngarggnmgnacnggnytnccnggnaaycarggngarccnggnwsnaarggncarccnggngaywsnggngaratgggnttyccnggnatggcnggnytnttyggnccnaarggnccnccnggngayathggnttyaarggnathcarggnccnmgnggnccnccnggnytnatgggnaargarggnathgtnggnccnytnggnathytnggnccnwsnggnytnccnggnccnaarggngayaarggnwsnmgnggngaytggggnytncarggnccnmgnggnccnccnggnccnmgnggnmgnccnggnccnccnggnccnccn

SEQ ID NO: 1144 - DNA, 1590 bp, Artificial Sequence
  hCol-CNA49 (alpha1(XXVIII) THD)
  misc_feature (3)..(3): n is a, c, g, or t
  misc_feature (9)..(9): n is a, c, g, or t
  misc_feature (12)..(12): n is a, c, g, or t
  misc_feature (18)..(18): n is a, c, g, or t
  misc_feature (21)..(21): n is a, c, g, or t
  misc_feature (24)..(24): n is a, c, g, or t
  misc_feature (27)..(27): n is a, c, g, or t
  misc_feature (30)..(30): n is a, c, g, or t
  misc_feature (33)..(33): n is a, c, g, or t
  misc_feature (39)..(39): n is a, c, g, or t
  misc_feature (45)..(45): n is a, c, g, or t
  misc_feature (48)..(48): n is a, c, g, or t
  misc_feature (57)..(57): n is a, c, g, or t
  misc_feature (63)..(63): n is a, c, g, or t
  misc_feature (66)..(66): n is a, c, g, or t
  misc_feature (69)..(69): n is a, c, g, or t
  misc_feature (75)..(75): n is a, c, g, or t
  misc_feature (81)..(81): n is a, c, g, or t
  misc_feature (84)..(84): n is a, c, g, or t
  misc_feature (90)..(90): n is a, c, g, or t
  misc_feature (99)..(99): n is a, c, g, or t
  misc_feature (105)..(105): n is a, c, g, or t
  misc_feature (108)..(108): n is a, c, g, or t
  misc_feature (114)..(114): n is a, c, g, or t
  misc_feature (117)..(117): n is a, c, g, or t
  misc_feature (120)..(120): n is a, c, g, or t
  misc_feature (123)..(123): n is a, c, g, or t
  misc_feature (126)..(126): n is a, c, g, or t
  misc_feature (132)..(132): n is a, c, g, or t
  misc_feature (135)..(135): n is a, c, g, or t
  misc_feature (144)..(144): n is a, c, g, or t
  misc_feature (153)..(153): n is a, c, g, or t
  misc_feature (159)..(159): n is a, c, g, or t
  misc_feature (162)..(162): n is a, c, g, or t
  misc_feature (171)..(171): n is a, c, g, or t
  misc_feature (177)..(177): n is a, c, g, or t
  misc_feature (180)..(180): n is a, c, g, or t
  misc_feature (189)..(189): n is a, c, g, or t
  misc_feature (198)..(198): n is a, c, g, or t
  misc_feature (201)..(201): n is a, c, g, or t
  misc_feature (204)..(204): n is a, c, g, or t
  misc_feature (207)..(207): n is a, c, g, or t
  misc_feature (210)..(210): n is a, c, g, or t
  misc_feature (216)..(216): n is a, c, g, or t
  misc_feature (219)..(219): n is a, c, g, or t
  misc_feature (225)..(225): n is a, c, g, or t
  misc_feature (228)..(228): n is a, c, g, or t
  misc_feature (231)..(231): n is a, c, g, or t
  misc_feature (234)..(234): n is a, c, g, or t
  misc_feature (243)..(243): n is a, c, g, or t
  misc_feature (249)..(249): n is a, c, g, or t
  misc_feature (252)..(252): n is a, c, g, or t
  misc_feature (255)..(255): n is a, c, g, or t
  misc_feature (258)..(258): n is a, c, g, or t
  misc_feature (261)..(261): n is a, c, g, or t
  misc_feature (267)..(267): n is a, c, g, or t
  misc_feature (270)..(270): n is a, c, g, or t
  misc_feature (273)..(273): n is a, c, g, or t
  misc_feature (279)..(279): n is a, c, g, or t
  misc_feature (288)..(288): n is a, c, g, or t
  misc_feature (297)..(297): n is a, c, g, or t
  misc_feature (303)..(303): n is a, c, g, or t
  misc_feature (306)..(306): n is a, c, g, or t
  misc_feature (309)..(309): n is a, c, g, or t
  misc_feature (312)..(312): n is a, c, g, or t
  misc_feature (315)..(315): n is a, c, g, or t
  misc_feature (318)..(318): n is a, c, g, or t
  misc_feature (324)..(324): n is a, c, g, or t
  misc_feature (327)..(327): n is a, c, g, or t
  misc_feature (330)..(330): n is a, c, g, or t
  misc_feature (333)..(333): n is a, c, g, or t
  misc_feature (336)..(336): n is a, c, g, or t
  misc_feature (339)..(339): n is a, c, g, or t
  misc_feature (342)..(342): n is a, c, g, or t
  misc_feature (348)..(348): n is a, c, g, or t
  misc_feature (357)..(357): n is a, c, g, or t
  misc_feature (366)..(366): n is a, c, g, or t
  misc_feature (372)..(372): n is a, c, g, or t
  misc_feature (375)..(375): n is a, c, g, or t
  misc_feature (384)..(384): n is a, c, g, or t
  misc_feature (387)..(387): n is a, c, g, or t
  misc_feature (390)..(390): n is a, c, g, or t
  misc_feature (393)..(393): n is a, c, g, or t
  misc_feature (396)..(396): n is a, c, g, or t
  misc_feature (399)..(399): n is a, c, g, or t
  misc_feature (402)..(402): n is a, c, g, or t
  misc_feature (405)..(405): n is a, c, g, or t
  misc_feature (411)..(411): n is a, c, g, or t
  misc_feature (414)..(414): n is a, c, g, or t
  misc_feature (417)..(417): n is a, c, g, or t
  misc_feature (423)..(423): n is a, c, g, or t
  misc_feature (426)..(426): n is a, c, g, or t
  misc_feature (432)..(432): n is a, c, g, or t
  misc_feature (435)..(435): n is a, c, g, or t
  misc_feature (438)..(438): n is a, c, g, or t
  misc_feature (441)..(441): n is a, c, g, or t
  misc_feature (444)..(444): n is a, c, g, or t
  misc_feature (447)..(447): n is a, c, g, or t
  misc_feature (453)..(453): n is a, c, g, or t
  misc_feature (456)..(456): n is a, c, g, or t
  misc_feature (459)..(459): n is a, c, g, or t
  misc_feature (462)..(462): n is a, c, g, or t
  misc_feature (468)..(468): n is a, c, g, or t
  misc_feature (471)..(471): n is a, c, g, or t
  misc_feature (474)..(474): n is a, c, g, or t
  misc_feature (477)..(477): n is a, c, g, or t
  misc_feature (480)..(480): n is a, c, g, or t
  misc_feature (486)..(486): n is a, c, g, or t
  misc_feature (492)..(492): n is a, c, g, or t
  misc_feature (495)..(495): n is a, c, g, or t
  misc_feature (498)..(498): n is a, c, g, or t
  misc_feature (504)..(504): n is a, c, g, or t
  misc_feature (513)..(513): n is a, c, g, or t
  misc_feature (516)..(516): n is a, c, g, or t
  misc_feature (522)..(522): n is a, c, g, or t
  misc_feature (525)..(525): n is a, c, g, or t
  misc_feature (528)..(528): n is a, c, g, or t
  misc_feature (531)..(531): n is a, c, g, or t
  misc_feature (534)..(534): n is a, c, g, or t
  misc_feature (540)..(540): n is a, c, g, or t
  misc_feature (543)..(543): n is a, c, g, or t
  misc_feature (549)..(549): n is a, c, g, or t
  misc_feature (552)..(552): n is a, c, g, or t
  misc_feature (555)..(555): n is a, c, g, or t
  misc_feature (564)..(564): n is a, c, g, or t
  misc_feature (573)..(573): n is a, c, g, or t
  misc_feature (582)..(582): n is a, c, g, or t
  misc_feature (585)..(585): n is a, c, g, or t
  misc_feature (588)..(588): n is a, c, g, or t
  misc_feature (591)..(591): n is a, c, g, or t
  misc_feature (594)..(594): n is a, c, g, or t
  misc_feature (600)..(600): n is a, c, g, or t
  misc_feature (603)..(603): n is a, c, g, or t
  misc_feature (609)..(609): n is a, c, g, or t
  misc_feature (615)..(615): n is a, c, g, or t
  misc_feature (618)..(618): n is a, c, g, or t
  misc_feature (624)..(624): n is a, c, g, or t
  misc_feature (627)..(627): n is a, c, g, or t
  misc_feature (633)..(633): n is a, c, g, or t
  misc_feature (642)..(642): n is a, c, g, or t
  misc_feature (651)..(651): n is a, c, g, or t
  misc_feature (654)..(654): n is a, c, g, or t
  misc_feature (660)..(660): n is a, c, g, or t
  misc_feature (663)..(663): n is a, c, g, or t
  misc_feature (666)..(666): n is a, c, g, or t
  misc_feature (669)..(669): n is a, c, g, or t
  misc_feature (672)..(672): n is a, c, g, or t
  misc_feature (678)..(678): n is a, c, g, or t
  misc_feature (681)..(681): n is a, c, g, or t
  misc_feature (684)..(684): n is a, c, g, or t
  misc_feature (687)..(687): n is a, c, g, or t
  misc_feature (693)..(693): n is a, c, g, or t
  misc_feature (696)..(696): n is a, c, g, or t
  misc_feature (699)..(699): n is a, c, g, or t
  misc_feature (702)..(702): n is a, c, g, or t
  misc_feature (705)..(705): n is a, c, g, or t
  misc_feature (711)..(711): n is a, c, g, or t
  misc_feature (717)..(717): n is a, c, g, or t
  misc_feature (720)..(720): n is a, c, g, or t
  misc_feature (729)..(729): n is a, c, g, or t
  misc_feature (732)..(732): n is a, c, g, or t
  misc_feature (735)..(735): n is a, c, g, or t
  misc_feature (738)..(738): n is a, c, g, or t
  misc_feature (741)..(741): n is a, c, g, or t
  misc_feature (744)..(744): n is a, c, g, or t
  misc_feature (747)..(747): n is a, c, g, or t
  misc_feature (750)..(750): n is a, c, g, or t
  misc_feature (753)..(753): n is a, c, g, or t
  misc_feature (756)..(756): n is a, c, g, or t
  misc_feature (762)..(762): n is a, c, g, or t
  misc_feature (765)..(765): n is a, c, g, or t
  misc_feature (771)..(771): n is a, c, g, or t
  misc_feature (774)..(774): n is a, c, g, or t
  misc_feature (780)..(780): n is a, c, g, or t
  misc_feature (786)..(786): n is a, c, g, or t
  misc_feature (789)..(789): n is a, c, g, or t
  misc_feature (792)..(792): n is a, c, g, or t
  misc_feature (798)..(798): n is a, c, g, or t
  misc_feature (801)..(801): n is a, c, g, or t
  misc_feature (804)..(804): n is a, c, g, or t
  misc_feature (807)..(807): n is a, c, g, or t
  misc_feature (813)..(813): n is a, c, g, or t
  misc_feature (816)..(816): n is a, c, g, or t
  misc_feature (819)..(819): n is a, c, g, or t
  misc_feature (822)..(822): n is a, c, g, or t
  misc_feature (825)..(825): n is a, c, g, or t
  misc_feature (834)..(834): n is a, c, g, or t
  misc_feature (837)..(837): n is a, c, g, or t
  misc_feature (840)..(840): n is a, c, g, or t
  misc_feature (843)..(843): n is a, c, g, or t
  misc_feature (852)..(852): n is a, c, g, or t
  misc_feature (858)..(858): n is a, c, g, or t
  misc_feature (861)..(861): n is a, c, g, or t
  misc_feature (864)..(864): n is a, c, g, or t
  misc_feature (867)..(867): n is a, c, g, or t
  misc_feature (870)..(870): n is a, c, g, or t
  misc_feature (873)..(873): n is a, c, g, or t
  misc_feature (876)..(876): n is a, c, g, or t
  misc_feature (879)..(879): n is a, c, g, or t
  misc_feature (882)..(882): n is a, c, g, or t
  misc_feature (888)..(888): n is a, c, g, or t
  misc_feature (891)..(891): n is a, c, g, or t
  misc_feature (894)..(894): n is a, c, g, or t
  misc_feature (897)..(897): n is a, c, g, or t
  misc_feature (903)..(903): n is a, c, g, or t
  misc_feature (909)..(909): n is a, c, g, or t
  misc_feature (912)..(912): n is a, c, g, or t
  misc_feature (915)..(915): n is a, c, g, or t
  misc_feature (921)..(921): n is a, c, g, or t
  misc_feature (930)..(930): n is a, c, g, or t
  misc_feature (939)..(939): n is a, c, g, or t
  misc_feature (942)..(942): n is a, c, g, or t
  misc_feature (948)..(948): n is a, c, g, or t
  misc_feature (957)..(957): n is a, c, g, or t
  misc_feature (963)..(963): n is a, c, g, or t
  misc_feature (966)..(966): n is a, c, g, or t
  misc_feature (969)..(969): n is a, c, g, or t
  misc_feature (972)..(972): n is a, c, g, or t
  misc_feature (975)..(975): n is a, c, g, or t
  misc_feature (978)..(978): n is a, c, g, or t
  misc_feature (984)..(984): n is a, c, g, or t
  misc_feature (987)..(987): n is a, c, g, or t
  misc_feature (993)..(993): n is a, c, g, or t
  misc_feature (999)..(999): n is a, c, g, or t
  misc_feature (1002)..(1002): n is a, c, g, or t
  misc_feature (1011)..(1011): n is a, c, g, or t
  misc_feature (1014)..(1014): n is a, c, g, or t
  misc_feature (1020)..(1020): n is a, c, g, or t
  misc_feature (1026)..(1026): n is a, c, g, or t
  misc_feature (1029)..(1029): n is a, c, g, or t
  misc_feature (1032)..(1032): n is a, c, g, or t
  misc_feature (1035)..(1035): n is a, c, g, or t
  misc_feature (1041)..(1041): n is a, c, g, or t
  misc_feature (1044)..(1044): n is a, c, g, or t
  misc_feature (1047)..(1047): n is a, c, g, or t
  misc_feature (1050)..(1050): n is a, c, g, or t
  misc_feature (1053)..(1053): n is a, c, g, or t
  misc_feature (1056)..(1056): n is a, c, g, or t
  misc_feature (1062)..(1062): n is a, c, g, or t
  misc_feature (1068)..(1068): n is a, c, g, or t
  misc_feature (1071)..(1071): n is a, c, g, or t
  misc_feature (1074)..(1074): n is a, c, g, or t
  misc_feature (1077)..(1077): n is a, c, g, or t
  misc_feature (1080)..(1080): n is a, c, g, or t
  misc_feature (1086)..(1086): n is a, c, g, or t
  misc_feature (1089)..(1089): n is a, c, g, or t
  misc_feature (1098)..(1098): n is a, c, g, or t
  misc_feature (1104)..(1104): n is a, c, g, or t
  misc_feature (1107)..(1107): n is a, c, g, or t
  misc_feature (1110)..(1110): n is a, c, g, or t
  misc_feature (1113)..(1113): n is a, c, g, or t
  misc_feature (1119)..(1119): n is a, c, g, or t
  misc_feature (1122)..(1122): n is a, c, g, or t
  misc_feature (1125)..(1125): n is a, c, g, or t
  misc_feature (1131)..(1131): n is a, c, g, or t
  misc_feature (1134)..(1134): n is a, c, g, or t
  misc_feature (1140)..(1140): n is a, c, g, or t
  misc_feature (1143)..(1143): n is a, c, g, or t
  misc_feature (1146)..(1146): n is a, c, g, or t
  misc_feature (1149)..(1149): n is a, c, g, or t
  misc_feature (1152)..(1152): n is a, c, g, or t
  misc_feature (1155)..(1155): n is a, c, g, or t
  misc_feature (1158)..(1158): n is a, c, g, or t
  misc_feature (1161)..(1161): n is a, c, g, or t
  misc_feature (1164)..(1164): n is a, c, g, or t
  misc_feature (1167)..(1167): n is a, c, g, or t
  misc_feature (1170)..(1170): n is a, c, g, or t
  misc_feature (1176)..(1176): n is a, c, g, or t
  misc_feature (1182)..(1182): n is a, c, g, or t
  misc_feature (1188)..(1188): n is a, c, g, or t
  misc_feature (1191)..(1191): n is a, c, g, or t
  misc_feature (1194)..(1194): n is a, c, g, or t
  misc_feature (1197)..(1197): n is a, c, g, or t
  misc_feature (1200)..(1200): n is a, c, g, or t
  misc_feature (1203)..(1203): n is a, c, g, or t
  misc_feature (1206)..(1206): n is a, c, g, or t
  misc_feature (1209)..(1209): n is a, c, g, or t
  misc_feature (1212)..(1212): n is a, c, g, or t
  misc_feature (1215)..(1215): n is a, c, g, or t
  misc_feature (1218)..(1218): n is a, c, g, or t
  misc_feature (1221)..(1221): n is a, c, g, or t
  misc_feature (1224)..(1224): n is a, c, g, or t
  misc_feature (1227)..(1227): n is a, c, g, or t
  misc_feature (1230)..(1230): n is a, c, g, or t
  misc_feature (1236)..(1236): n is a, c, g, or t
  misc_feature (1239)..(1239): n is a, c, g, or t
  misc_feature (1242)..(1242): n is a, c, g, or t
  misc_feature (1245)..(1245): n is a, c, g, or t
  misc_feature (1248)..(1248): n is a, c, g, or t
  misc_feature (1251)..(1251): n is a, c, g, or t
  misc_feature (1257)..(1257): n is a, c, g, or t
  misc_feature (1260)..(1260): n is a, c, g, or t
  misc_feature (1263)..(1263): n is a, c, g, or t
  misc_feature (1269)..(1269): n is a, c, g, or t
  misc_feature (1275)..(1275): n is a, c, g, or t
  misc_feature (1278)..(1278): n is a, c, g, or t
  misc_feature (1281)..(1281): n is a, c, g, or t
  misc_feature (1284)..(1284): n is a, c, g, or t
  misc_feature (1287)..(1287): n is a, c, g, or t
  misc_feature (1290)..(1290): n is a, c, g, or t
  misc_feature (1293)..(1293): n is a, c, g, or t
  misc_feature (1296)..(1296): n is a, c, g, or t
  misc_feature (1299)..(1299): n is a, c, g, or t
  misc_feature (1302)..(1302): n is a, c, g, or t
  misc_feature (1305)..(1305): n is a, c, g, or t
  misc_feature (1308)..(1308): n is a, c, g, or t
  misc_feature (1311)..(1311): n is a, c, g, or t
  misc_feature (1314)..(1314): n is a, c, g, or t
  misc_feature (1317)..(1317): n is a, c, g, or t
  misc_feature (1320)..(1320): n is a, c, g, or t
  misc_feature (1323)..(1323): n is a, c, g, or t
  misc_feature (1329)..(1329): n is a, c, g, or t
  misc_feature (1332)..(1332): n is a, c, g, or t
  misc_feature (1338)..(1338): n is a, c, g, or t
  misc_feature (1344)..(1344): n is a, c, g, or t
  misc_feature (1347)..(1347): n is a, c, g, or t
  misc_feature (1356)..(1356): n is a, c, g, or t
  misc_feature (1359)..(1359): n is a, c, g, or t
  misc_feature (1362)..(1362): n is a, c, g, or t
  misc_feature (1365)..(1365): n is a, c, g, or t
  misc_feature (1368)..(1368): n is a, c, g, or t
  misc_feature (1371)..(1371): n is a, c, g, or t
  misc_feature (1374)..(1374): n is a, c, g, or t
  misc_feature (1377)..(1377): n is a, c, g, or t
  misc_feature (1380)..(1380): n is a, c, g, or t
  misc_feature (1383)..(1383): n is a, c, g, or t
  misc_feature (1389)..(1389): n is a, c, g, or t
  misc_feature (1392)..(1392): n is a, c, g, or t
  misc_feature (1398)..(1398): n is a, c, g, or t
  misc_feature (1407)..(1407): n is a, c, g, or t
  misc_feature (1416)..(1416): n is a, c, g, or t
  misc_feature (1419)..(1419): n is a, c, g, or t
  misc_feature (1425)..(1425): n is a, c, g, or t
  misc_feature (1431)..(1431): n is a, c, g, or t
  misc_feature (1434)..(1434): n is a, c, g, or t
  misc_feature (1437)..(1437): n is a, c, g, or t
  misc_feature (1443)..(1443): n is a, c, g, or t
  misc_feature (1446)..(1446): n is a, c, g, or t
  misc_feature (1452)..(1452): n is a, c, g, or t
  misc_feature (1458)..(1458): n is a, c, g, or t
  misc_feature (1461)..(1461): n is a, c, g, or t
  misc_feature (1464)..(1464): n is a, c, g, or t
  misc_feature (1467)..(1467): n is a, c, g, or t
  misc_feature (1476)..(1476): n is a, c, g, or t
  misc_feature (1485)..(1485): n is a, c, g, or t
  misc_feature (1491)..(1491): n is a, c, g, or t
  misc_feature (1494)..(1494): n is a, c, g, or t
  misc_feature (1500)..(1500): n is a, c, g, or t
  misc_feature (1503)..(1503): n is a, c, g, or t
  misc_feature (1512)..(1512): n is a, c, g, or t
  misc_feature (1521)..(1521): n is a, c, g, or t
  misc_feature (1530)..(1530): n is a, c, g, or t
  misc_feature (1536)..(1536): n is a, c, g, or t
  misc_feature (1539)..(1539): n is a, c, g, or t
  misc_feature (1542)..(1542): n is a, c, g, or t
  misc_feature (1545)..(1545): n is a, c, g, or t
  misc_feature (1548)..(1548): n is a, c, g, or t
  misc_feature (1557)..(1557): n is a, c, g, or t
  misc_feature (1560)..(1560): n is a, c, g, or t
  misc_feature (1566)..(1566): n is a, c, g, or t
  misc_feature (1569)..(1569): n is a, c, g, or t
  misc_feature (1575)..(1575): n is a, c, g, or t
  misc_feature (1581)..(1581): n is a, c, g, or t
  misc_feature (1584)..(1584): n is a, c, g, or t
  misc_feature (1587)..(1587): n is a, c, g, or t
  misc_feature (1590)..(1590): n is a, c, g, or t
ggngayccnggngayccnggnccnccnggnacncayggnaayccnggnathaarggngarmgnggnccnaarggnaayccnggnaaygcncaraarggngargcnggngarmgnggnccnggnggnathccnggntayaarggngayaarggngarmgnggngartgyggnaarccnggnathaarggngayaarggnwsnccnggnccntayggnccnaarggnccnmgnggnathcarggnathacnggnccnccnggngayccnggnccnaarggnttycarggnaayaarggngarccnggnccnccnggnccntayggnwsnccnggngcnccnggnathggncarcarggnathaarggngarmgnggncargarggnmgnccnggngcnccnggnccnathggngtnggngarccnggncarccnggnccnmgnggnccngarggngtnccnggngarmgnggnytnccnggngarggnttyccnggnccnaarggngaraarggnwsngarggnccnacnggnccncarggnytncarggnytnwsnathaarggngaraarggngayathggnccngtnggnccncarggnccnatgggnathccnggnathggnwsncarggngarcarggnathcarggnccnathggnccnccnggnccncarggnccngcnggncarggnytnccnggnwsnaarggngargtnggncaratgggnccnacnggnccnmgnggnccngtnggnathggngtncarggnccnaarggngarccnggnwsnathggnytnccnggncarccnggngtnccnggngargayggngcngcnggnaaraarggngargcnggnytnccnggngcnmgnggnccngarggnccnccnggnaarggncarccnggnccnaarggngaygarggnaaraarggnwsnaarggnaaycarggncarmgnggnytnccnggnccngarggnccnaarggngarccnggnathatgggnccnttyggnatgccnggnacnwsnathccnggnccnccnggnccnaarggngaymgnggnggnccnggnathccnggnttyaarggngarccnggnytnwsnathmgnggnccnaarggngtncarggnccnmgnggnccngtnggngcnccnggnytnaarggngayggntayccnggngtnccnggnccnmgnggnytnccnggnccnccnggnccnatgggnytnmgnggngtnggngayacnggngcnaarggngarccnggngtnmgnggnccnccnggnccnwsnggnccnmgnggngtnggnacncarggnccnaarggngayacnggncaraarggnytnccnggnccnccnggnccnccnggntayggnwsncarggnathaarggngarcarggnccncarggnttyccnggnccnaarggnacnatgggncayggnytnccnggncaraarggngarcayggngarmgnggngaygtnggnaaraarggngayaarggngarathggngarccnggnwsnccnggnaarcarggnytncarggnccnaarggngayytnggnytnacn

SEQ ID NO: 1145 - DNA, 237 bp, Artificial Sequence
  hCol-CNA50 (C1q A THD)
  misc_feature (3)..(3): n is a, c, g, or t
  misc_feature (12)..(12): n is a, c, g, or t
  misc_feature (18)..(18): n is a, c, g, or t
  misc_feature (21)..(21): n is a, c, g, or t
  misc_feature (24)..(24): n is a, c, g, or t
  misc_feature (27)..(27): n is a, c, g, or t
  misc_feature (30)..(30): n is a, c, g, or t
  misc_feature (33)..(33): n is a, c, g, or t
  misc_feature (36)..(36): n is a, c, g, or t
  misc_feature (39)..(39): n is a, c, g, or t
  misc_feature (42)..(42): n is a, c, g, or t
  misc_feature (45)..(45): n is a, c, g, or t
  misc_feature (48)..(48): n is a, c, g, or t
  misc_feature (51)..(51): n is a, c, g, or t
  misc_feature (57)..(57): n is a, c, g, or t
  misc_feature (66)..(66): n is a, c, g, or t
  misc_feature (72)..(72): n is a, c, g, or t
  misc_feature (75)..(75): n is a, c, g, or t
  misc_feature (78)..(78): n is a, c, g, or t
  misc_feature (81)..(81): n is a, c, g, or t
  misc_feature (84)..(84): n is a, c, g, or t
  misc_feature (90)..(90): n is a, c, g, or t
  misc_feature (93)..(93): n is a, c, g, or t
  misc_feature (96)..(96): n is a, c, g, or t
  misc_feature (105)..(105): n is a, c, g, or t
  misc_feature (108)..(108): n is a, c, g, or t
  misc_feature (114)..(114): n is a, c, g, or t
  misc_feature (123)..(123): n is a, c, g, or t
  misc_feature (129)..(129): n is a, c, g, or t
  misc_feature (132)..(132): n is a, c, g, or t
  misc_feature (135)..(135): n is a, c, g, or t
  misc_feature (138)..(138): n is a, c, g, or t
  misc_feature (141)..(141): n is a, c, g, or t
  misc_feature (147)..(147): n is a, c, g, or t
  misc_feature (150)..(150): n is a, c, g, or t
  misc_feature (156)..(156): n is a, c, g, or t
  misc_feature (159)..(159): n is a, c, g, or t
  misc_feature (165)..(165): n is a, c, g, or t
  misc_feature (168)..(168): n is a, c, g, or t
  misc_feature (171)..(171): n is a, c, g, or t
  misc_feature (174)..(174): n is a, c, g, or t
  misc_feature (177)..(177): n is a, c, g, or t
  misc_feature (180)..(180): n is a, c, g, or t
  misc_feature (183)..(183): n is a, c, g, or t
  misc_feature (186)..(186): n is a, c, g, or t
  misc_feature (189)..(189): n is a, c, g, or t
  misc_feature (192)..(192): n is a, c, g, or t
  misc_feature (195)..(195): n is a, c, g, or t
  misc_feature (201)..(201): n is a, c, g, or t
  misc_feature (204)..(204): n is a, c, g, or t
  misc_feature (213)..(213): n is a, c, g, or t
  misc_feature (216)..(216): n is a, c, g, or t
  misc_feature (222)..(222): n is a, c, g, or t
  misc_feature (225)..(225): n is a, c, g, or t
  misc_feature (228)..(228): n is a, c, g, or t
  misc_feature (231)..(231): n is a, c, g, or t
ggnaaraarggngargcnggnmgnccnggnmgnmgnggnmgnccnggnytnaarggngarcarggngarccnggngcnccnggnathmgnacnggnathcarggnytnaarggngaycarggngarccnggnccnwsnggnaayccnggnaargtnggntayccnggnccnwsnggnccnytnggngcnmgnggnathccnggnathaarggnacnaarggnwsnccnggnaayath

SEQ ID NO: 1146 - DNA, 252 bp, Artificial Sequence
  hCol-CNA51 (C1q B THD)
  misc_feature (3)..(3): n is a, c, g, or t
  misc_feature (6)..(6): n is a, c, g, or t
  misc_feature (9)..(9): n is a, c, g, or t
  misc_feature (12)..(12): n is a, c, g, or t
  misc_feature (18)..(18): n is a, c, g, or t
  misc_feature (21)..(21): n is a, c, g, or t
  misc_feature (27)..(27): n is a, c, g, or t
  misc_feature (30)..(30): n is a, c, g, or t
  misc_feature (36)..(36): n is a, c, g, or t
  misc_feature (39)..(39): n is a, c, g, or t
  misc_feature (42)..(42): n is a, c, g, or t
  misc_feature (45)..(45): n is a, c, g, or t
  misc_feature (48)..(48): n is a, c, g, or t
  misc_feature (51)..(51): n is a, c, g, or t
  misc_feature (57)..(57): n is a, c, g, or t
  misc_feature (63)..(63): n is a, c, g, or t
  misc_feature (66)..(66): n is a, c, g, or t
  misc_feature (69)..(69): n is a, c, g, or t
  misc_feature (72)..(72): n is a, c, g, or t
  misc_feature (75)..(75): n is a, c, g, or t
  misc_feature (84)..(84): n is a, c, g, or t
  misc_feature (93)..(93): n is a, c, g, or t
  misc_feature (96)..(96): n is a, c, g, or t
  misc_feature (99)..(99): n is a, c, g, or t
  misc_feature (102)..(102): n is a, c, g, or t
  misc_feature (105)..(105): n is a, c, g, or t
  misc_feature (108)..(108): n is a, c, g, or t
  misc_feature (111)..(111): n is a, c, g, or t
  misc_feature (120)..(120): n is a, c, g, or t
  misc_feature (129)..(129): n is a, c, g, or t
  misc_feature (138)..(138): n is a, c, g, or t
  misc_feature (144)..(144): n is a, c, g, or t
  misc_feature (147)..(147): n is a, c, g, or t
  misc_feature (153)..(153): n is a, c, g, or t
  misc_feature (156)..(156): n is a, c, g, or t
  misc_feature (162)..(162): n is a, c, g, or t
  misc_feature (165)..(165): n is a, c, g, or t
  misc_feature (171)..(171): n is a, c, g, or t
  misc_feature (174)..(174): n is a, c, g, or t
  misc_feature (177)..(177): n is a, c, g, or t
  misc_feature (183)..(183): n is a, c, g, or t
  misc_feature (186)..(186): n is a, c, g, or t
  misc_feature (192)..(192): n is a, c, g, or t
  misc_feature (195)..(195): n is a, c, g, or t
  misc_feature (201)..(201): n is a, c, g, or t
  misc_feature (204)..(204): n is a, c, g, or t
  misc_feature (207)..(207): n is a, c, g, or t
  misc_feature (210)..(210): n is a, c, g, or t
  misc_feature (213)..(213): n is a, c, g, or t
  misc_feature (216)..(216): n is a, c, g, or t
  misc_feature (219)..(219): n is a, c, g, or t
  misc_feature (222)..(222): n is a, c, g, or t
  misc_feature (225)..(225): n is a, c, g, or t
  misc_feature (228)..(228): n is a, c, g, or t
  misc_feature (231)..(231): n is a, c, g, or t
  misc_feature (237)..(237): n is a, c, g, or t
  misc_feature (243)..(243): n is a, c, g, or t
  misc_feature (246)..(246): n is a, c, g, or t
ggnccnccngcnathccnggnathccnggnathccnggnacnccnggnccngayggncarccnggnacnccnggnathaarggngaraarggnytnccnggnytngcnggngaycayggngarttyggngaraarggngayccnggnathccnggnaayccnggnaargtnggnccnaarggnccnatgggnccnaarggnggnccnggngcnccnggngcnccnggnccnaarggngarwsnggngaytay

SEQ ID NO: 1147 - DNA, 252 bp, Artificial Sequence
  hCol-CNA52 (C1q C THD)
  misc_feature (3)..(3): n is a, c, g, or t
  misc_feature (12)..(12): n is a, c, g, or t
  misc_feature (18)..(18): n is a, c, g, or t
  misc_feature (21)..(21): n is a, c, g, or t
  misc_feature (27)..(27): n is a, c, g, or t
  misc_feature (30)..(30): n is a, c, g, or t
  misc_feature (33)..(33): n is a, c, g, or t
  misc_feature (36)..(36): n is a, c, g, or t
  misc_feature (39)..(39): n is a, c, g, or t
  misc_feature (42)..(42): n is a, c, g, or t
  misc_feature (45)..(45): n is a, c, g, or t
  misc_feature (48)..(48): n is a, c, g, or t
  misc_feature (57)..(57): n is a, c, g, or t
  misc_feature (66)..(66): n is a, c, g, or t
  misc_feature (69)..(69): n is a, c, g, or t
  misc_feature (72)..(72): n is a, c, g, or t
  misc_feature (75)..(75): n is a, c, g, or t
  misc_feature (78)..(78): n is a, c, g, or t
  misc_feature (84)..(84): n is a, c, g, or t
  misc_feature (90)..(90): n is a, c, g, or t
  misc_feature (93)..(93): n is a, c, g, or t
  misc_feature (99)..(99): n is a, c, g, or t
  misc_feature (102)..(102): n is a, c, g, or t
  misc_feature (108)..(108): n is a, c, g, or t
  misc_feature (111)..(111): n is a, c, g, or t
  misc_feature (117)..(117): n is a, c, g, or t
  misc_feature (120)..(120): n is a, c, g, or t
  misc_feature (123)..(123): n is a, c, g, or t
  misc_feature (129)..(129): n is a, c, g, or t
  misc_feature (138)..(138): n is a, c, g, or t
  misc_feature (144)..(144): n is a, c, g, or t
  misc_feature (147)..(147): n is a, c, g, or t
  misc_feature (150)..(150): n is a, c, g, or t
  misc_feature (153)..(153): n is a, c, g, or t
  misc_feature (156)..(156): n is a, c, g, or t
  misc_feature (162)..(162): n is a, c, g, or t
  misc_feature (165)..(165): n is a, c, g, or t
  misc_feature (174)..(174): n is a, c, g, or t
  misc_feature (177)..(177): n is a, c, g, or t
  misc_feature (183)..(183): n is a, c, g, or t
  misc_feature (186)..(186): n is a, c, g, or t
  misc_feature (189)..(189): n is a, c, g, or t
  misc_feature (192)..(192): n is a, c, g, or t
  misc_feature (198)..(198): n is a, c, g, or t
  misc_feature (201)..(201): n is a, c, g, or t
  misc_feature (204)..(204): n is a, c, g, or t
  misc_feature (207)..(207): n is a, c, g, or t
  misc_feature (210)..(210): n is a, c, g, or t
  misc_feature (213)..(213): n is a, c, g, or t
  misc_feature (219)..(219): n is a, c, g, or t
  misc_feature (225)..(225): n is a, c, g, or t
  misc_feature (228)..(228): n is a, c, g, or t
  misc_feature (234)..(234): n is a, c, g, or t
  misc_feature (237)..(237): n is a, c, g, or t
  misc_feature (246)..(246): n is a, c, g, or t
  misc_feature (249)..(249): n is a, c, g, or t
ggntgytayggnathccnggnatgccnggnytnccnggngcnccnggnaargayggntaygayggnytnccnggnccnaarggngarccnggnathccngcnathccnggnathmgnggnccnaarggncaraarggngarccnggnytnccnggncayccnggnaaraayggnccnatgggnccnccnggnatgccnggngtnccnggnccnatgggnathccnggngarccnggngargarggnmgntay

SEQ ID NO: 1148 - DNA, 153 bp, Artificial Sequence
  hCol-CNA53 (C1q-like 1 THD)
  misc_feature (3)..(3): n is a, c, g, or t
  misc_feature (6)..(6): n is a, c, g, or t
  misc_feature (12)..(12): n is a, c, g, or t
  misc_feature (18)..(18): n is a, c, g, or t
  misc_feature (21)..(21): n is a, c, g, or t
  misc_feature (24)..(24): n is a, c, g, or t
  misc_feature (27)..(27): n is a, c, g, or t
  misc_feature (30)..(30): n is a, c, g, or t
  misc_feature (36)..(36): n is a, c, g, or t
  misc_feature (39)..(39): n is a, c, g, or t
  misc_feature (42)..(42): n is a, c, g, or t
  misc_feature (45)..(45): n is a, c, g, or t
  misc_feature (48)..(48): n is a, c, g, or t
  misc_feature (51)..(51): n is a, c, g, or t
  misc_feature (54)..(54): n is a, c, g, or t
  misc_feature (57)..(57): n is a, c, g, or t
  misc_feature (63)..(63): n is a, c, g, or t
  misc_feature (66)..(66): n is a, c, g, or t
  misc_feature (69)..(69): n is a, c, g, or t
  misc_feature (72)..(72): n is a, c, g, or t
  misc_feature (75)..(75): n is a, c, g, or t
  misc_feature (78)..(78): n is a, c, g, or t
  misc_feature (81)..(81): n is a, c, g, or t
  misc_feature (84)..(84): n is a, c, g, or t
  misc_feature (87)..(87): n is a, c, g, or t
  misc_feature (90)..(90): n is a, c, g, or t
  misc_feature (93)..(93): n is a, c, g, or t
  misc_feature (102)..(102): n is a, c, g, or t
  misc_feature (108)..(108): n is a, c, g, or t
  misc_feature (111)..(111): n is a, c, g, or t
  misc_feature (117)..(117): n is a, c, g, or t
  misc_feature (120)..(120): n is a, c, g, or t
  misc_feature (123)..(123): n is a, c, g, or t
  misc_feature (126)..(126): n is a, c, g, or t
  misc_feature (129)..(129): n is a, c, g, or t
  misc_feature (132)..(132): n is a, c, g, or t
  misc_feature (135)..(135): n is a, c, g, or t
  misc_feature (138)..(138): n is a, c, g, or t
  misc_feature (141)..(141): n is a, c, g, or t
  misc_feature (144)..(144): n is a, c, g, or t
  misc_feature (147)..(147): n is a, c, g, or t
  misc_feature (150)..(150): n is a, c, g, or t
  misc_feature (153)..(153): n is a, c, g, or t
ggnccncarggnaarccnggnmgnacnggnaarccnggnccnccnggnccnccnggngayccnggnccnccnggnccngtnggnccnccnggngaraarggngarccnggnaarccnggnccnccnggnytnccnggngcnggnggnwsnggn

SEQ ID NO: 1149 - DNA, 135 bp, Artificial Sequence
  hCol-CNA54 (C1q-like 2 THD)
  misc_feature (3)..(3): n is a, c, g, or t
  misc_feature (6)..(6): n is a, c, g, or t
  misc_feature (12)..(12): n is a, c, g, or t
  misc_feature (18)..(18): n is a, c, g, or t
  misc_feature (21)..(21): n is a, c, g, or t
  misc_feature (24)..(24): n is a, c, g, or t
  misc_feature (27)..(27): n is a, c, g, or t
  misc_feature (30)..(30): n is a, c, g, or t
  misc_feature (36)..(36): n is a, c, g, or t
  misc_feature (39)..(39): n is a, c, g, or t
  misc_feature (42)..(42): n is a, c, g, or t
  misc_feature (45)..(45): n is a, c, g, or t
  misc_feature (48)..(48): n is a, c, g, or t
  misc_feature (51)..(51): n is a, c, g, or t
  misc_feature (54)..(54): n is a, c, g, or t
  misc_feature (57)..(57): n is a, c, g, or t
  misc_feature (63)..(63): n is a, c, g, or t
  misc_feature (66)..(66): n is a, c, g, or t
  misc_feature (69)..(69): n is a, c, g, or t
  misc_feature (72)..(72): n is a, c, g, or t
  misc_feature (75)..(75): n is a, c, g, or t
  misc_feature (78)..(78): n is a, c, g, or t
  misc_feature (81)..(81): n is a, c, g, or t
  misc_feature (84)..(84): n is a, c, g, or t
  misc_feature (87)..(87): n is a, c, g, or t
  misc_feature (90)..(90): n is a, c, g, or t
  misc_feature (93)..(93): n is a, c, g, or t
  misc_feature (102)..(102): n is a, c, g, or t
  misc_feature (108)..(108): n is a, c, g, or t
  misc_feature (111)..(111): n is a, c, g, or t
  misc_feature (114)..(114): n is a, c, g, or t
  misc_feature (117)..(117): n is a, c, g, or t
  misc_feature (120)..(120): n is a, c, g, or t
  misc_feature (123)..(123): n is a, c, g, or t
  misc_feature (126)..(126): n is a, c, g, or t
  misc_feature (129)..(129): n is a, c, g, or t
  misc_feature (132)..(132): n is a, c, g, or t
ggnccnaarggngayccnggnmgnccnggnaarccnggnccnmgnggnccnccnggngarccnggnccnccnggnccnmgnggnccnccnggngaraarggngaywsnggnmgnccnggnytnccnggnytncar

SEQ ID NO: 1150 - DNA, 153 bp, Artificial Sequence
  hCol-CNA55 (C1q-like 3 THD)
  misc_feature (3)..(3): n is a, c, g, or t
  misc_feature (6)..(6): n is a, c, g, or t
  misc_feature (12)..(12): n is a, c, g, or t
  misc_feature (18)..(18): n is a, c, g, or t
  misc_feature (21)..(21): n is a, c, g, or t
  misc_feature (24)..(24): n is a, c, g, or t
  misc_feature (27)..(27): n is a, c, g, or t
  misc_feature (30)..(30): n is a, c, g, or t
  misc_feature (36)..(36): n is a, c, g, or t
  misc_feature (39)..(39): n is a, c, g, or t
  misc_feature (42)..(42): n is a, c, g, or t
  misc_feature (45)..(45): n is a, c, g, or t
  misc_feature (48)..(48): n is a, c, g, or t
  misc_feature (51)..(51): n is a, c, g, or t
  misc_feature (54)..(54): n is a, c, g, or t
  misc_feature (57)..(57): n is a, c, g, or t
  misc_feature (63)..(63): n is a, c, g, or t
  misc_feature (66)..(66): n is a, c, g, or t
  misc_feature (69)..(69): n is a, c, g, or t
  misc_feature (72)..(72): n is a, c, g, or t
  misc_feature (75)..(75): n is a, c, g, or t
  misc_feature (78)..(78): n is a, c, g, or t
  misc_feature (84)..(84): n is a, c, g, or t
  misc_feature (87)..(87): n is a, c, g, or t
  misc_feature (90)..(90): n is a, c, g, or t
  misc_feature (93)..(93): n is a, c, g, or t
  misc_feature (102)..(102): n is a, c, g, or t
  misc_feature (108)..(108): n is a, c, g, or t
  misc_feature (111)..(111): n is a, c, g, or t
  misc_feature (114)..(114): n is a, c, g, or t
  misc_feature (120)..(120): n is a, c, g, or t
  misc_feature (123)..(123): n is a, c, g, or t
  misc_feature (126)..(126): n is a, c, g, or t
  misc_feature (129)..(129): n is a, c, g, or t
  misc_feature (132)..(132): n is a, c, g, or t
  misc_feature (135)..(135): n is a, c, g, or t
  misc_feature (138)..(138): n is a, c, g, or t
  misc_feature (141)..(141): n is a, c, g, or t
  misc_feature (144)..(144): n is a, c, g, or t
  misc_feature (147)..(147): n is a, c, g, or t
  misc_feature (150)..(150): n is a, c, g, or t
ggnccnaarggngargcnggnmgnccnggnaargcnggnccnmgnggnccnccnggngarccnggnccnccnggnccnatgggnccnccnggngaraarggngarccnggnmgncarggnytnccnggnccnccnggngcnccnggnytnaay

SEQ ID NO: 1151 - DNA, 141 bp, Artificial Sequence
  hCol-CNA56 (C1q-like 4 THD)
  misc_feature (3)..(3): n is a, c, g, or t
  misc_feature (6)..(6): n is a, c, g, or t
  misc_feature (12)..(12): n is a, c, g, or t
  misc_feature (18)..(18): n is a, c, g, or t
  misc_feature (21)..(21): n is a, c, g, or t
  misc_feature (24)..(24): n is a, c, g, or t
  misc_feature (27)..(27): n is a, c, g, or t
  misc_feature (30)..(30): n is a, c, g, or t
  misc_feature (36)..(36): n is a, c, g, or t
  misc_feature (39)..(39): n is a, c, g, or t
  misc_feature (42)..(42): n is a, c, g, or t
  misc_feature (45)..(45): n is a, c, g, or t
  misc_feature (48)..(48): n is a, c, g, or t
  misc_feature (51)..(51): n is a, c, g, or t
  misc_feature (54)..(54): n is a, c, g, or t
  misc_feature (57)..(57): n is a, c, g, or t
  misc_feature (60)..(60): n is a, c, g, or t
  misc_feature (63)..(63): n is a, c, g, or t
  misc_feature (66)..(66): n is a, c, g, or t
  misc_feature (69)..(69): n is a, c, g, or t
  misc_feature (72)..(72): n is a, c, g, or t
  misc_feature (75)..(75): n is a, c, g, or t
  misc_feature (78)..(78): n is a, c, g, or t
  misc_feature (81)..(81): n is a, c, g, or t
  misc_feature (84)..(84): n is a, c, g, or t
  misc_feature (90)..(90): n is a, c, g, or t
  misc_feature (93)..(93): n is a, c, g, or t
  misc_feature (96)..(96): n is a, c, g, or t
  misc_feature (99)..(99): n is a, c, g, or t
  misc_feature (102)..(102): n is a, c, g, or t
  misc_feature (105)..(105): n is a, c, g, or t
  misc_feature (108)..(108): n is a, c, g, or t
  misc_feature (111)..(111): n is a, c, g, or t
  misc_feature (114)..(114): n is a, c, g, or t
  misc_feature (117)..(117): n is a, c, g, or t
  misc_feature (120)..(120): n is a, c, g, or t
  misc_feature (123)..(123): n is a, c, g, or t
  misc_feature (126)..(126): n is a, c, g, or t
  misc_feature (129)..(129): n is a, c, g, or t
  misc_feature (132)..(132): n is a, c, g, or t
  misc_feature (135)..(135): n is a, c, g, or t
  misc_feature (138)..(138): n is a, c, g, or t
  misc_feature (141)..(141): n is a, c, g, or t
ggngcnaarggngargtnggnmgnmgnggnaargcnggnytnmgnggnccnccnggnccnccnggnccnmgnggnccnccnggngarccnggnmgnccnggnccnccnggnccnccnggnccnggnccnggnggngtngcn

SEQ ID NO: 1152 - DNA, 126 bp, Artificial Sequence
  hCol-CNA57 (C1q-TNF-related 1 THD)
  misc_feature (3)..(3): n is a, c, g, or t
  misc_feature (12)..(12): n is a, c, g, or t
  misc_feature (18)..(18): n is a, c, g, or t
  misc_feature (21)..(21): n is a, c, g, or t
  misc_feature (27)..(27): n is a, c, g, or t
  misc_feature (30)..(30): n is a, c, g, or t
  misc_feature (33)..(33): n is a, c, g, or t
  misc_feature (39)..(39): n is a, c, g, or t
  misc_feature (48)..(48): n is a, c, g, or t
  misc_feature (54)..(54): n is a, c, g, or t
  misc_feature (57)..(57): n is a, c, g, or t
  misc_feature (60)..(60): n is a, c, g, or t
  misc_feature (63)..(63): n is a, c, g, or t
  misc_feature (66)..(66): n is a, c, g, or t
  misc_feature (69)..(69): n is a, c, g, or t
  misc_feature (72)..(72): n is a, c, g, or t
  misc_feature (75)..(75): n is a, c, g, or t
  misc_feature (81)..(81): n is a, c, g, or t
  misc_feature (84)..(84): n is a, c, g, or t
  misc_feature (87)..(87): n is a, c, g, or t
  misc_feature (93)..(93): n is a, c, g, or t
  misc_feature (102)..(102): n is a, c, g, or t
  misc_feature (105)..(105): n is a, c, g, or t
  misc_feature (111)..(111): n is a, c, g, or t
  misc_feature (114)..(114): n is a, c, g, or t
  misc_feature (117)..(117): n is a, c, g, or t
  misc_feature (120)..(120): n is a, c, g, or t
  misc_feature (126)..(126): n is a, c, g, or t
ggngaraarggngaymgnggngaymgnggnytncarggnaartayggnaaracnggnwsngcnggngcnmgnggncayacnggnccnaarggncaraarggnwsnatgggngcnccnggngarmgn

SEQ ID NO: 1153 - DNA, 306 bp, Artificial Sequence
  hCol-CNA58 (C1q-TNF-related 2 THD)
  misc_feature (3)..(3): n is a, c, g, or t
  misc_feature (6)..(6): n is a, c, g, or t
  misc_feature (12)..(12): n is a, c, g, or t
  misc_feature (15)..(15): n is a, c, g, or t
  misc_feature (18)..(18): n is a, c, g, or t
  misc_feature (21)..(21): n is a, c, g, or t
  misc_feature (24)..(24): n is a, c, g, or t
  misc_feature (27)..(27): n is a, c, g, or t
  misc_feature (30)..(30): n is a, c, g, or t
  misc_feature (33)..(33): n is a, c, g, or t
  misc_feature (36)..(36): n is a, c, g, or t
  misc_feature (39)..(39): n is a, c, g, or t
  misc_feature (42)..(42): n is a, c, g, or t
  misc_feature (45)..(45): n is a, c, g, or t
  misc_feature (48)..(48): n is a, c, g, or t
  misc_feature (57)..(57): n is a, c, g, or t
  misc_feature (60)..(60): n is a, c, g, or t
  misc_feature (66)..(66): n is a, c, g, or t
  misc_feature (72)..(72): n is a, c, g, or t
  misc_feature (75)..(75): n is a, c, g, or t
  misc_feature (84)..(84): n is a, c, g, or t
  misc_feature (93)..(93): n is a, c, g, or t
  misc_feature (102)..(102): n is a, c, g, or t
  misc_feature (108)..(108): n is a, c, g, or t
  misc_feature (111)..(111): n is a, c, g, or t
  misc_feature (117)..(117): n is a, c, g, or t
  misc_feature (120)..(120): n is a, c, g, or t
  misc_feature (129)..(129): n is a, c, g, or t
  misc_feature (132)..(132): n is a, c, g, or t
  misc_feature (135)..(135): n is a, c, g, or t
  misc_feature (138)..(138): n is a, c, g, or t
  misc_feature (141)..(141): n is a, c, g, or t
  misc_feature (144)..(144): n is a, c, g, or t
  misc_feature (147)..(147): n is a, c, g, or t
  misc_feature (153)..(153): n is a, c, g, or t
  misc_feature (156)..(156): n is a, c, g, or t
  misc_feature (162)..(162): n is a, c, g, or t
  misc_feature (165)..(165): n is a, c, g, or t
  misc_feature (168)..(168): n is a, c, g, or t
  misc_feature (174)..(174): n is a, c, g, or t
  misc_feature (180)..(180): n is a, c, g, or t
  misc_feature (183)..(183): n is a, c, g, or t
  misc_feature (186)..(186): n is a, c, g, or t
  misc_feature (192)..(192): n is a, c, g, or t
  misc_feature (195)..(195): n is a, c, g, or t
  misc_feature (198)..(198): n is a, c, g, or t
  misc_feature (201)..(201): n is a, c, g, or t
  misc_feature (204)..(204): n is a, c, g, or t
  misc_feature (207)..(207): n is a, c, g, or t
  misc_feature (210)..(210): n is a, c, g, or t
  misc_feature (213)..(213): n is a, c, g, or t
  misc_feature (219)..(219): n is a, c, g, or t
  misc_feature (222)..(222): n is a, c, g, or t
  misc_feature (228)..(228): n is a, c, g, or t
  misc_feature (231)..(231): n is a, c, g, or t
  misc_feature (234)..(234): n is a, c, g, or t
  misc_feature (237)..(237): n is a, c, g, or t
  misc_feature (246)..(246): n is a, c, g, or t
  misc_feature (249)..(249): n is a, c, g, or t
  misc_feature (252)..(252): n is a, c, g, or t
  misc_feature (255)..(255): n is a, c, g, or t
  misc_feature (264)..(264): n is a, c, g, or t
  misc_feature (267)..(267): n is a, c, g, or t
  misc_feature (273)..(273): n is a, c, g, or t
  misc_feature (282)..(282): n is a, c, g, or t
  misc_feature (288)..(288): n is a, c, g, or t
  misc_feature (291)..(291): n is a, c, g, or t
  misc_feature (294)..(294): n is a, c, g, or t
  misc_feature (297)..(297): n is a, c, g, or t
  misc_feature (300)..(300): n is a, c, g, or t
  misc_feature (303)..(303): n is a, c, g, or t
ggnccncarggnccnccnggnccnccnggngcnccnggnccnwsnggnatgatgggnmgnatgggnttyccnggnaargayggncargayggncaygayggngaymgnggngaywsnggngargarggnccnccnggnmgnacnggnaaymgnggnaarccnggnccnaarggnaargcnggngcnathggnmgngcnggnccnmgnggnccnaarggngtnaayggnacnccnggnaarcayggnacnccnggnaaraarggnccnaarggnaaraarggngarccnggnytnccnggnccntgy

SEQ ID NO: 1154 - DNA, 189 bp, Artificial Sequence
  hCol-CNA59 (C1q-TNF-related 3 THD)
  misc_feature (3)..(3): n is a, c, g, or t
  misc_feature (12)..(12): n is a, c, g, or t
  misc_feature (15)..(15): n is a, c, g, or t
  misc_feature (18)..(18): n is a, c, g, or t
  misc_feature (21)..(21): n is a, c, g, or t
  misc_feature (24)..(24): n is a, c, g, or t
  misc_feature (27)..(27): n is a, c, g, or t
  misc_feature (30)..(30): n is a, c, g, or t
  misc_feature (33)..(33): n is a, c, g, or t
  misc_feature (36)..(36): n is a, c, g, or t
  misc_feature (39)..(39): n is a, c, g, or t
  misc_feature (45)..(45): n is a, c, g, or t
  misc_feature (48)..(48): n is a, c, g, or t
  misc_feature (57)..(57): n is a, c, g, or t
  misc_feature (66)..(66): n is a, c, g, or t
  misc_feature (75)..(75): n is a, c, g, or t
  misc_feature (78)..(78): n is a, c, g, or t
  misc_feature (81)..(81): n is a, c, g, or t
  misc_feature (84)..(84): n is a, c, g, or t
  misc_feature (93)..(93): n is a, c, g, or t
  misc_feature (96)..(96): n is a, c, g, or t
  misc_feature (102)..(102): n is a, c, g, or t
  misc_feature (111)..(111): n is a, c, g, or t
  misc_feature (120)..(120): n is a, c, g, or t
  misc_feature (126)..(126): n is a, c, g, or t
  misc_feature (129)..(129): n is a, c, g, or t
  misc_feature (132)..(132): n is a, c, g, or t
  misc_feature (135)..(135): n is a, c, g, or t
  misc_feature (138)..(138): n is a, c, g, or t
  misc_feature (144)..(144): n is a, c, g, or t
  misc_feature (147)..(147): n is a, c, g, or t
  misc_feature (156)..(156): n is a, c, g, or t
  misc_feature (159)..(159): n is a, c, g, or t
  misc_feature (165)..(165): n is a, c, g, or t
  misc_feature (174)..(174): n is a, c, g, or t
  misc_feature (180)..(180): n is a, c, g, or t
  misc_feature (183)..(183): n is a, c, g, or t
  misc_feature (189)..(189): n is a, c, g, or t
ggntaycarggnccnccnggnccnccnggnccnccnggnathccnggnaaycayggnaayaayggnaayaayggngcnacnggncaygarggngcnaarggngaraarggngayaarggngayytnggnccnmgnggngarmgnggncarcayggnccnaarggngaraarggntayccnggnathccn

SEQ ID NO: 1155 - DNA, 207 bp, Artificial Sequence
  hCol-CNA60 (C1q-TNF-related 5 THD)
  misc_feature (3)..(3): n is a, c, g, or t
  misc_feature (9)..(9): n is a, c, g, or t
  misc_feature (12)..(12): n is a, c, g, or t
  misc_feature (15)..(15): n is a, c, g, or t
  misc_feature (18)..(18): n is a, c, g, or t
  misc_feature (21)..(21): n is a, c, g, or t
  misc_feature (24)..(24): n is a, c, g, or t
  misc_feature (27)..(27): n is a, c, g, or t
  misc_feature (30)..(30): n is a, c, g, or t
  misc_feature (39)..(39): n is a, c, g, or t
  misc_feature (42)..(42): n is a, c, g, or t
  misc_feature (48)..(48): n is a, c, g, or t
  misc_feature (51)..(51): n is a, c, g, or t
  misc_feature (54)..(54): n is a, c, g, or t
  misc_feature (57)..(57): n is a, c, g, or t
  misc_feature (60)..(60): n is a, c, g, or t
  misc_feature (66)..(66): n is a, c, g, or t
  misc_feature (69)..(69): n is a, c, g, or t
  misc_feature (75)..(75): n is a, c, g, or t
  misc_feature (78)..(78): n is a, c, g, or t
  misc_feature (84)..(84): n is a, c, g, or t
  misc_feature (87)..(87): n is a, c, g, or t
  misc_feature (90)..(90): n is a, c, g, or t
  misc_feature (93)..(93): n is a, c, g, or t
  misc_feature (96)..(96): n is a, c, g, or t
  misc_feature (99)..(99): n is a, c, g, or t
  misc_feature (102)..(102): n is a, c, g, or t
  misc_feature (111)..(111): n is a, c, g, or t
  misc_feature (117)..(117): n is a, c, g, or t
  misc_feature (120)..(120): n is a, c, g, or t
  misc_feature (123)..(123): n is a, c, g, or t
  misc_feature (126)..(126): n is a, c, g, or t
  misc_feature (129)..(129): n is a, c, g, or t
  misc_feature (132)..(132): n is a, c, g, or t
  misc_feature (135)..(135): n is a, c, g, or t
  misc_feature (138)..(138): n is a, c, g, or t
  misc_feature (141)..(141): n is a, c, g, or t
  misc_feature (144)..(144): n is a, c, g, or t
  misc_feature (147)..(147): n is a, c, g, or t
  misc_feature (153)..(153): n is a, c, g, or t
  misc_feature (156)..(156): n is a, c, g, or t
  misc_feature (159)..(159): n is a, c, g, or t
  misc_feature (162)..(162): n is a, c, g, or t
  misc_feature (165)..(165): n is a, c, g, or t
  misc_feature (171)..(171): n is a, c, g, or t
  misc_feature (174)..(174): n is a, c, g, or t
  misc_feature (177)..(177): n is a, c, g, or t
  misc_feature (180)..(180): n is a, c, g, or t
  misc_feature (183)..(183): n is a, c, g, or t
  misc_feature (186)..(186): n is a, c, g, or t
  misc_feature (189)..(189): n is a, c, g, or t
  misc_feature (192)..(192): n is a, c, g, or t
  misc_feature (195)..(195): n is a, c, g, or t
  misc_feature (198)..(198): n is a, c, g, or t
  misc_feature (201)..(201): n is a, c, g, or t
ggncayccnggnytnccnggnacnccnggncaycayggnwsncarggnytnccnggnmgngayggnmgngayggnmgngayggngcnccnggngcnccnggngaraarggngarggnggnmgnccnggnytnccnggnccnmgnggngayccnggnccnmgnggngargcnggnccngcnggnccnacnggnccngcnggngartgy

SEQ ID NO: 1156 - DNA, 126 bp, Artificial Sequence
  hCol-CNA61 (C1q-TNF-related 6 THD)
  misc_feature (3)..(3): n is a, c, g, or t
  misc_feature (12)..(12): n is a, c, g, or t
  misc_feature (18)..(18): n is a, c, g, or t
  misc_feature (21)..(21): n is a, c, g, or t
  misc_feature (24)..(24): n is a, c, g, or t
  misc_feature (30)..(30): n is a, c, g, or t
  misc_feature (33)..(33): n is a, c, g, or t
  misc_feature (36)..(36): n is a, c, g, or t
  misc_feature (39)..(39): n is a, c, g, or t
  misc_feature (48)..(48): n is a, c, g, or t
  misc_feature (51)..(51): n is a, c, g, or t
  misc_feature (57)..(57): n is a, c, g, or t
  misc_feature (60)..(60): n is a, c, g, or t
  misc_feature (66)..(66): n is a, c, g, or t
  misc_feature (72)..(72): n is a, c, g, or t
  misc_feature (75)..(75): n is a, c, g, or t
  misc_feature (78)..(78): n is a, c, g, or t
  misc_feature (84)..(84): n is a, c, g, or t
  misc_feature (87)..(87): n is a, c, g, or t
  misc_feature (93)..(93): n is a, c, g, or t
  misc_feature (102)..(102): n is a, c, g, or t
  misc_feature (111)..(111): n is a, c, g, or t
  misc_feature (114)..(114): n is a, c, g, or t
  misc_feature (117)..(117): n is a, c, g, or t
  misc_feature (120)..(120): n is a, c, g, or t
  misc_feature (123)..(123): n is a, c, g, or t
  misc_feature (126)..(126): n is a, c, g, or t
ggngayaarggngayccnggnccnatgggnytnccnggntayatgggnmgngarggnccncarggngarccnggnccncarggnwsnaarggngayaarggngaratgggnwsnccnggngcnccn

SEQ ID NO: 1157 - DNA, 306 bp, Artificial Sequence
  hCol-CNA62 (C1q-TNF-related 7 THD)
  misc_feature (3)..(3): n is a, c, g, or t
  misc_feature (6)..(6): n is a, c, g, or t
  misc_feature (9)..(9): n is a, c, g, or t
  misc_feature (12)..(12): n is a, c, g, or t
  misc_feature (15)..(15): n is a, c, g, or t
  misc_feature (18)..(18): n is a, c, g, or t
  misc_feature (21)..(21): n is a, c, g, or t
  misc_feature (24)..(24): n is a, c, g, or t
  misc_feature (27)..(27): n is a, c, g, or t
  misc_feature (30)..(30): n is a, c, g, or t
  misc_feature (33)..(33): n is a, c, g, or t
  misc_feature (39)..(39): n is a, c, g, or t
  misc_feature (42)..(42): n is a, c, g, or t
  misc_feature (45)..(45): n is a, c, g, or t
  misc_feature (48)..(48): n is a, c, g, or t
  misc_feature (51)..(51): n is a, c, g, or t
  misc_feature (57)..(57): n is a, c, g, or t
  misc_feature (60)..(60): n is a, c, g, or t
  misc_feature (66)..(66): n is a, c, g, or t
  misc_feature (69)..(69): n is a, c, g, or t
  misc_feature (72)..(72): n is a, c, g, or t
  misc_feature (75)..(75): n is a, c, g, or t
  misc_feature (78)..(78): n is a, c, g, or t
  misc_feature (84)..(84): n is a, c, g, or t
  misc_feature (87)..(87): n is a, c, g, or t
  misc_feature (93)..(93): n is a, c, g, or t
  misc_feature (96)..(96): n is a, c, g, or t
  misc_feature (102)..(102): n is a, c, g, or t
  misc_feature (111)..(111): n is a, c, g, or t
  misc_feature (120)..(120): n is a, c, g, or t
  misc_feature (123)..(123): n is a, c, g, or t
  misc_feature (126)..(126): n is a, c, g, or t
  misc_feature (129)..(129): n is a, c, g, or t
  misc_feature (132)..(132): n is a, c, g, or t
  misc_feature (135)..(135): n is a, c, g, or t
  misc_feature (138)..(138): n is a, c, g, or t
  misc_feature (144)..(144): n is a, c, g, or t
  misc_feature (147)..(147): n is a, c, g, or t
  misc_feature (150)..(150): n is a, c, g, or t
  misc_feature (153)..(153): n is a, c, g, or t
  misc_feature (156)..(156): n is a, c, g, or t
  misc_feature (159)..(159): n is a, c, g, or t
  misc_feature (162)..(162): n is a, c, g, or t
  misc_feature (165)..(165): n is a, c, g, or t
  misc_feature (174)..(174): n is a, c, g, or t
  misc_feature (183)..(183): n is a, c, g, or t
  misc_feature (189)..(189): n is a, c, g, or t
  misc_feature (192)..(192): n is a, c, g, or t
  misc_feature (201)..(201): n is a, c, g, or t
  misc_feature (204)..(204): n is a, c, g, or t
  misc_feature (210)..(210): n is a, c, g, or t
  misc_feature (213)..(213): n is a, c, g, or t
  misc_feature (219)..(219): n is a, c, g, or t
  misc_feature (228)..(228): n is a, c, g, or t
  misc_feature (234)..(234): n is a, c, g, or t
  misc_feature (237)..(237): n is a, c, g, or t
  misc_feature (240)..(240): n is a, c, g, or t
  misc_feature (246)..(246): n is a, c, g, or t
  misc_feature (249)..(249): n is a, c, g, or t
  misc_feature (252)..(252): n is a, c, g, or t
  misc_feature (255)..(255): n is a, c, g, or t
  misc_feature (258)..(258): n is a, c, g, or t
  misc_feature (264)..(264): n is a, c, g, or t
  misc_feature (270)..(270): n is a, c, g, or t
  misc_feature (273)..(273): n is a, c, g, or t
  misc_feature (282)..(282): n is a, c, g, or t
  misc_feature (288)..(288): n is a, c, g, or t
  misc_feature (291)..(291): n is a, c, g, or t
  misc_feature (294)..(294): n is a, c, g, or t
  misc_feature (297)..(297): n is a, c, g, or t
  misc_feature (300)..(300): n is a, c, g, or t
  misc_feature (303)..(303): n is a, c, g, or t
ggnytnccnggnccnccnggnccnccnggngcnaayggnwsnccnggnccncayggnmgnathggnytnccnggnmgngayggnmgngayggnmgnaarggngaraarggngaraarggnacngcnggnytnmgnggnaaracnggnccnytnggnytngcnggngaraarggngaycarggngaracnggnaaraarggnccnathggnccngarggngaraarggngargtnggnccnathggnccnccnggnccnaarggngaymgnggngarcarggngayccnggnytnccnggngtntgy

SEQ ID NO: 1158 - DNA, 126 bp, Artificial Sequence
  hCol-CNA63 (C1q-TNF-related 8 THD)
  misc_feature (3)..(3): n is a, c, g, or t
  misc_feature (12)..(12): n is a, c, g, or t
  misc_feature (18)..(18): n is a, c, g, or t
  misc_feature (21)..(21): n is a, c, g, or t
  misc_feature (24)..(24): n is a, c, g, or t
  misc_feature (27)..(27): n is a, c, g, or t
  misc_feature (30)..(30): n is a, c, g, or t
  misc_feature (33)..(33): n is a, c, g, or t
  misc_feature (36)..(36): n is a, c, g, or t
  misc_feature (39)..(39): n is a, c, g, or t
  misc_feature (42)..(42): n is a, c, g, or t
  misc_feature (45)..(45): n is a, c, g, or t
  misc_feature (48)..(48): n is a, c, g, or t
  misc_feature (57)..(57): n is a, c, g, or t
  misc_feature (60)..(60): n is a, c, g, or t
  misc_feature (63)..(63): n is a, c, g, or t
  misc_feature (66)..(66): n is a, c, g, or t
  misc_feature (69)..(69): n is a, c, g, or t
  misc_feature (72)..(72): n is a, c, g, or t
  misc_feature (75)..(75): n is a, c, g, or t
  misc_feature (78)..(78): n is a, c, g, or t
  misc_feature (84)..(84): n is a, c, g, or t
  misc_feature (87)..(87): n is a, c, g, or t
  misc_feature (90)..(90): n is a, c, g, or t
  misc_feature (93)..(93): n is a, c, g, or t
  misc_feature (102)..(102): n is a, c, g, or t
  misc_feature (108)..(108): n is a, c, g, or t
  misc_feature (111)..(111): n is a, c, g, or t
  misc_feature (114)..(114): n is a, c, g, or t
  misc_feature (117)..(117): n is a, c, g, or t
  misc_feature (120)..(120): n is a, c, g, or t
  misc_feature (123)..(123): n is a, c, g, or t
  misc_feature (126)..(126): n is a, c, g, or t
ggngaraarggngargcnggngtnmgnggnmgngcnggnmgnwsnggnaargarggnccnccnggngcnmgnggnytncarggnmgnmgnggncaraarggncargtnggnccnccnggngcngcn

SEQ ID NO: 1159 - DNA, 513 bp, Artificial Sequence
  hCol-CNA64 (C1q-TNF-related 9A THD)
  misc_feature (3)..(3): n is a, c, g, or t
  misc_feature (9)..(9): n is a, c, g, or t
  misc_feature (12)..(12): n is a, c, g, or t
  misc_feature (18)..(18): n is a, c, g, or t
  misc_feature (21)..(21): n is a, c, g, or t
  misc_feature (27)..(27): n is a, c, g, or t
  misc_feature (30)..(30): n is a, c, g, or t
  misc_feature (39)..(39): n is a, c, g, or t
  misc_feature (42)..(42): n is a, c, g, or t
  misc_feature (45)..(45): n is a, c, g, or t
  misc_feature (48)..(48): n is a, c, g, or t
  misc_feature (51)..(51): n is a, c, g, or t
  misc_feature (57)..(57): n is a, c, g, or t
  misc_feature (60)..(60): n is a, c, g, or t
  misc_feature (66)..(66): n is a, c, g, or t
  misc_feature (69)..(69): n is a, c, g, or t
  misc_feature (75)..(75): n is a, c, g, or t
  misc_feature (84)..(84): n is a, c, g, or t
  misc_feature (90)..(90): n is a, c, g, or t
  misc_feature (93)..(93): n is a, c, g, or t
  misc_feature (99)..(99): n is a, c, g, or t
  misc_feature (102)..(102): n is a, c, g, or t
  misc_feature (105)..(105): n is a, c, g, or t
  misc_feature (108)..(108): n is a, c, g, or t
  misc_feature (111)..(111): n is a, c, g, or t
  misc_feature (114)..(114): n is a, c, g, or t
  misc_feature (117)..(117): n is a, c, g, or t
  misc_feature (120)..(120): n is a, c, g, or t
  misc_feature (129)..(129): n is a, c, g, or t
  misc_feature (132)..(132): n is a, c, g, or t
  misc_feature (135)..(135): n is a, c, g, or t
  misc_feature (138)..(138): n is a, c, g, or t
  misc_feature (147)..(147): n is a, c, g, or t
  misc_feature (153)..(153): n is a, c, g, or t
  misc_feature (156)..(156): n is a, c, g, or t
  misc_feature (159)..(159): n is a, c, g, or t
  misc_feature (165)..(165): n is a, c, g, or t
  misc_feature (171)..(171): n is a, c, g, or t
  misc_feature (177)..(177): n is a, c, g, or t
  misc_feature (183)..(183): n is a, c, g, or t
  misc_feature (192)..(192): n is a, c, g, or t
  misc_feature (201)..(201): n is a, c, g, or t
  misc_feature (204)..(204): n is a, c, g, or t
  misc_feature (207)..(207): n is a, c, g, or t
  misc_feature (210)..(210): n is a, c, g, or t
  misc_feature (213)..(213): n is a, c, g, or t
  misc_feature (216)..(216): n is a, c, g, or t
  misc_feature (219)..(219): n is a, c, g, or t
  misc_feature (228)..(228): n is a, c, g, or t
  misc_feature (231)..(231): n is a, c, g, or t
  misc_feature (237)..(237): n is a, c, g, or t
  misc_feature (240)..(240): n is a, c, g, or t
  misc_feature (243)..(243): n is a, c, g, or t
  misc_feature (246)..(246): n is a, c, g, or t
  misc_feature (249)..(249): n is a, c, g, or t
  misc_feature (255)..(255): n is a, c, g, or t
  misc_feature (264)..(264): n is a, c, g, or t
  misc_feature (267)..(267): n is a, c, g, or t
  misc_feature (270)..(270): n is a, c, g, or t
  misc_feature (273)..(273): n is a, c, g, or t
  misc_feature (279)..(279): n is a, c, g, or t
  misc_feature (282)..(282): n is a, c, g, or t
  misc_feature (285)..(285): n is a, c, g, or t
  misc_feature (291)..(291): n is a, c, g, or t
  misc_feature (300)..(300): n is a, c, g, or t
  misc_feature (309)..(309): n is a, c, g, or t
  misc_feature (315)..(315): n is a, c, g, or t
  misc_feature (318)..(318): n is a, c, g, or t
  misc_feature (321)..(321): n is a, c, g, or t
  misc_feature (324)..(324): n is a, c, g, or t
  misc_feature (327)..(327): n is a, c, g, or t
  misc_feature (330)..(330): n is a, c, g, or t
  misc_feature (336)..(336): n is a, c, g, or t
  misc_feature (339)..(339): n is a, c, g, or t
  misc_feature (342)..(342): n is a, c, g, or t
  misc_feature (345)..(345): n is a, c, g, or t
  misc_feature (354)..(354): n is a, c, g, or t
  misc_feature (357)..(357): n is a, c, g, or t
  misc_feature (360)..(360): n is a, c, g, or t
  misc_feature (363)..(363): n is a, c, g, or t
  misc_feature (366)..(366): n is a, c, g, or t
  misc_feature (369)..(369): n is a, c, g, or t
  misc_feature (372)..(372): n is a, c, g, or t
  misc_feature (375)..(375): n is a, c, g, or t
  misc_feature (378)..(378): n is a, c, g, or t
  misc_feature (381)..(381): n is a, c, g, or t
  misc_feature (384)..(384): n is a, c, g, or t
  misc_feature (390)..(390): n is a, c, g, or t
  misc_feature (393)..(393): n is a, c, g, or t
  misc_feature (399)..(399): n is a, c, g, or t
  misc_feature (405)..(405): n is a, c, g, or t
  misc_feature (408)..(408): n is a, c, g, or t
  misc_feature (411)..(411): n is a, c, g, or t
  misc_feature (417)..(417): n is a, c, g, or t
  misc_feature (423)..(423): n is a, c, g, or t
  misc_feature (426)..(426): n is a, c, g, or t
  misc_feature (429)..(429): n is a, c, g, or t
  misc_feature (432)..(432): n is a, c, g, or t
  misc_feature (435)..(435): n is a, c, g, or t
  misc_feature (438)..(438): n is a, c, g, or t
  misc_feature (444)..(444): n is a, c, g, or t
  misc_feature (450)..(450): n is a, c, g, or t
  misc_feature (453)..(453): n is a, c, g, or t
  misc_feature (456)..(456): n is a, c, g, or t
  misc_feature (459)..(459): n is a, c, g, or t
  misc_feature (462)..(462): n is a, c, g, or t
  misc_feature (468)..(468): n is a, c, g, or t
  misc_feature (471)..(471): n is a, c, g, or t
  misc_feature (480)..(480): n is a, c, g, or t
  misc_feature (486)..(486): n is a, c, g, or t
  misc_feature (489)..(489): n is a, c, g, or t
  misc_feature (498)..(498): n is a, c, g, or t
  misc_feature (507)..(507): n is a, c, g, or t
  misc_feature (513)..(513): n is a, c, g, or t
ggncayccnggnathccnggnaayccnggncayaayggnytnccnggnmgngayggnmgngayggngcnaarggngayaarggngaygcnggngarccnggnmgnccnggnwsnccnggnaargayggnacnwsnggngaraarggngarmgnggngcngayggnaargtngargcnaarggnathaarggngaycarggnwsnmgnggnwsnccnggnaarcayggnccnaarggnytngcnggnccnatgggngaraarggnytnmgnggngaracnggnccncarggncaraarggnaayaarggngaygtnggnccnacnggnccngarggnccnmgnggnaayathggnccnytnggnccnacnggnytnccnggnccnatgggnccnathggnaarccnggnccnaarggngargcnggnccnacnggnccncarggngarccnggngtnmgnggnathmgnggntggaarggngaymgnggngaraarggnaarathggngaracn

SEQ ID NO: 1160 - DNA, 513 bp, Artificial Sequence
  hCol-CNA65 (C1q-TNF-related 9B THD)
  misc_feature (3)..(3): n is a, c, g, or t
  misc_feature (9)..(9): n is a, c, g, or t
  misc_feature (12)..(12): n is a, c, g, or t
  misc_feature (18)..(18): n is a, c, g, or t
  misc_feature (21)..(21): n is a, c, g, or t
  misc_feature (27)..(27): n is a, c, g, or t
  misc_feature (30)..(30): n is a, c, g, or t
  misc_feature (39)..(39): n is a, c, g, or t
  misc_feature (42)..(42): n is a, c, g, or t
  misc_feature (45)..(45): n is a, c, g, or t
  misc_feature (48)..(48): n is a, c, g, or t
  misc_feature (51)..(51): n is a, c, g, or t
  misc_feature (57)..(57): n is a, c, g, or t
  misc_feature (60)..(60): n is a, c, g, or t
  misc_feature (66)..(66): n is a, c, g, or t
  misc_feature (69)..(69): n is a, c, g, or t
  misc_feature (75)..(75): n is a, c, g, or t
  misc_feature (84)..(84): n is a, c, g, or t
  misc_feature (90)..(90): n is a, c, g, or t
  misc_feature (93)..(93): n is a, c, g, or t
  misc_feature (99)..(99): n is a, c, g, or t
  misc_feature (102)..(102): n is a, c, g, or t
  misc_feature (108)..(108): n is a, c, g, or t
  misc_feature (111)..(111): n is a, c, g, or t
  misc_feature (114)..(114): n is a, c, g, or t
  misc_feature (117)..(117): n is a, c, g, or t
  misc_feature (120)..(120): n is a, c, g, or t
  misc_feature (129)..(129): n is a, c, g, or t
  misc_feature (132)..(132): n is a, c, g, or t
  misc_feature (135)..(135): n is a, c, g, or t
  misc_feature (138)..(138): n is a, c, g, or t
  misc_feature (147)..(147): n is a, c, g, or t
  misc_feature (153)..(153): n is a, c, g, or t
  misc_feature (156)..(156): n is a, c, g, or t
  misc_feature (159)..(159): n is a, c, g, or t
  misc_feature (165)..(165): n is a, c, g, or t
  misc_feature (171)..(171): n is a, c, g, or t
  misc_feature (177)..(177): n is a, c, g, or t
  misc_feature (183)..(183): n is a, c, g, or t
  misc_feature (192)..(192): n is a, c, g, or t
  misc_feature (201)..(201): n is a, c, g, or t
  misc_feature (204)..(204): n is a, c, g, or t
  misc_feature (207)..(207): n is a, c, g, or t
  misc_feature (210)..(210): n is a, c, g, or t
  misc_feature (213)..(213): n is a, c, g, or t
  misc_feature (216)..(216): n is a, c, g, or t
  misc_feature (219)..(219): n is a, c, g, or t
  misc_feature (228)..(228): n is a, c, g, or t
  misc_feature (231)..(231): n is a, c, g, or t
  misc_feature (237)..(237): n is a, c, g, or t
  misc_feature (240)..(240): n is a, c, g, or t
  misc_feature (243)..(243): n is a, c, g, or t
  misc_feature (246)..(246): n is a, c, g, or t
  misc_feature (249)..(249): n is a, c, g, or t
  misc_feature (255)..(255): n is a, c, g, or t
  misc_feature (264)..(264): n is a, c, g, or t
  misc_feature (267)..(267): n is a, c, g, or t
  misc_feature (270)..(270): n is a, c, g, or t
  misc_feature (273)..(273): n is a, c, g, or t
  misc_feature (279)..(279): n is a, c, g, or t
  misc_feature (282)..(282): n is a, c, g, or t
  misc_feature (285)..(285): n is a, c, g, or t
  misc_feature (291)..(291): n is a, c, g, or t
  misc_feature (300)..(300): n is a, c, g, or t
  misc_feature (309)..(309): n is a, c, g, or t
  misc_feature (315)..(315): n is a, c, g, or t
  misc_feature (318)..(318): n is a, c, g, or t
  misc_feature (321)..(321): n is a, c, g, or t
  misc_feature (324)..(324): n is a, c, g, or t
  misc_feature (327)..(327): n is a, c, g, or t
  misc_feature (330)..(330): n is a, c, g, or t
  misc_feature (336)..(336): n is a, c, g, or t
  misc_feature (339)..(339): n is a, c, g, or t
  misc_feature (342)..(342): n is a, c, g, or t
  misc_feature (345)..(345): n is a, c, g, or t
  misc_feature (354)..(354): n is a, c, g, or t
  misc_feature (357)..(357): n is a, c, g, or t
  misc_feature (360)..(360): n is a, c, g, or t
  misc_feature (363)..(363): n is a, c, g, or t
  misc_feature (366)..(366): n is a, c, g, or t
  misc_feature (369)..(369): n is a, c, g, or t
  misc_feature (372)..(372): n is a, c, g, or t
  misc_feature (375)..(375): n is a, c, g, or t
  misc_feature (378)..(378): n is a, c, g, or t
  misc_feature (381)..(381): n is a, c, g, or t
  misc_feature (384)..(384): n is a, c, g, or t
  misc_feature (390)..(390): n is a, c, g, or t
  misc_feature (393)..(393): n is a, c, g, or t
  misc_feature (399)..(399): n is a, c, g, or t
  misc_feature (405)..(405): n is a, c, g, or t
  misc_feature (408)..(408): n is a, c, g, or t
  misc_feature (411)..(411): n is a, c, g, or t
  misc_feature (417)..(417): n is a, c, g, or t
  misc_feature (423)..(423): n is a, c, g, or t
  misc_feature (426)..(426): n is a, c, g, or t
  misc_feature (429)..(429): n is a, c, g, or t
  misc_feature (432)..(432): n is a, c, g, or t
  misc_feature (435)..(435): n is a, c, g, or t
  misc_feature (438)..(438): n is a, c, g, or t
  misc_feature (444)..(444): n is a, c, g, or t
  misc_feature (450)..(450): n is a, c, g, or t
  misc_feature (453)..(453): n is a, c, g, or t
  misc_feature (456)..(456): n is a, c, g, or t
  misc_feature (459)..(459): n is a, c, g, or t
  misc_feature (462)..(462): n is a, c, g, or t
  misc_feature (468)..(468): n is a, c, g, or t
  misc_feature (471)..(471): n is a, c, g, or t
  misc_feature (480)..(480): n is a, c, g, or t
  misc_feature (486)..(486): n is a, c, g, or t
  misc_feature (489)..(489): n is a, c, g, or t
  misc_feature (498)..(498): n is a, c, g, or t
  misc_feature (507)..(507): n is a, c, g, or t
  misc_feature (513)..(513): n is a, c, g, or t
ggncayccnggnathccnggnaayccnggncayaayggnytnccnggnmgngayggnmgngayggngcnaarggngayaarggngaygcnggngarccnggntgyccnggnwsnccnggnaargayggnacnwsnggngaraarggngarmgnggngcngayggnaargtngargcnaarggnathaarggngaycarggnwsnmgnggnwsnccnggnaarcayggnccnaarggnytngcnggnccnatgggngaraarggnytnmgnggngaracnggnccncarggncaraarggnaayaarggngaygtnggnccnacnggnccngarggnccnmgnggnaayathggnccnytnggnccnacnggnytnccnggnccnatgggnccnathggnaarccnggnccnaarggngargcnggnccnacnggnccncarggngarccnggngtnmgnggnathmgnggntggaarggngaymgnggngaraarggnaarathggngaracn

SEQ ID NO: 1161 - DNA, 198 bp, Artificial Sequence
  hCol-CNA66 (adiponectin THD)
  misc_feature (3)..(3): n is a, c, g, or t
  misc_feature (9)..(9): n is a, c, g, or t
  misc_feature (12)..(12): n is a, c, g, or t
  misc_feature (18)..(18): n is a, c, g, or t
  misc_feature (21)..(21): n is a, c, g, or t
  misc_feature (30)..(30): n is a, c, g, or t
  misc_feature (33)..(33): n is a, c, g, or t
  misc_feature (36)..(36): n is a, c, g, or t
  misc_feature (39)..(39): n is a, c, g, or t
  misc_feature (42)..(42): n is a, c, g, or t
  misc_feature (48)..(48): n is a, c, g, or t
  misc_feature (51)..(51): n is a, c, g, or t
  misc_feature (57)..(57): n is a, c, g, or t
  misc_feature (60)..(60): n is a, c, g, or t
  misc_feature (63)..(63): n is a, c, g, or t
  misc_feature (66)..(66): n is a, c, g, or t
  misc_feature (75)..(75): n is a, c, g, or t
  misc_feature (84)..(84): n is a, c, g, or t
  misc_feature (90)..(90): n is a, c, g, or t
  misc_feature (93)..(93): n is a, c, g, or t
  misc_feature (96)..(96): n is a, c, g, or t
  misc_feature (102)..(102): n is a, c, g, or t
  misc_feature (105)..(105): n is a, c, g, or t
  misc_feature (111)..(111): n is a, c, g, or t
  misc_feature (120)..(120): n is a, c, g, or t
  misc_feature (126)..(126): n is a, c, g, or t
  misc_feature (129)..(129): n is a, c, g, or t
  misc_feature (132)..(132): n is a, c, g, or t
  misc_feature (135)..(135): n is a, c, g, or t
  misc_feature (138)..(138): n is a, c, g, or t
  misc_feature (141)..(141): n is a, c, g, or t
  misc_feature (147)..(147): n is a, c, g, or t
  misc_feature (150)..(150): n is a, c, g, or t
  misc_feature (153)..(153): n is a, c, g, or t
  misc_feature (156)..(156): n is a, c, g, or t
  misc_feature (162)..(162): n is a, c, g, or t
  misc_feature (165)..(165): n is a, c, g, or t
  misc_feature (174)..(174): n is a, c, g, or t
  misc_feature (177)..(177): n is a, c, g, or t
  misc_feature (183)..(183): n is a, c, g, or t
  misc_feature (189)..(189): n is a, c, g, or t
  misc_feature (192)..(192): n is a, c, g, or t
  misc_feature (198)..(198): n is a, c, g, or t
ggnathccnggncayccnggncayaayggngcnccnggnmgngayggnmgngayggnacnccnggngaraarggngaraarggngayccnggnytnathggnccnaarggngayathggngaracnggngtnccnggngcngarggnccnmgnggnttyccnggnathcarggnmgnaarggngarccnggngarggn

SEQ ID NO: 1162 - DNA, 666 bp, Artificial Sequence
  hCol-CNA67 (otolin-1 THD)
  misc_feature (3)..(3): n is a, c, g, or t
  misc_feature (9)..(9): n is a, c, g, or t
  misc_feature (12)..(12): n is a, c, g, or t
  misc_feature (18)..(18): n is a, c, g, or t
  misc_feature (21)..(21): n is a, c, g, or t
  misc_feature (24)..(24): n is a, c, g, or t
  misc_feature (30)..(30): n is a, c, g, or t
  misc_feature (36)..(36): n is a, c, g, or t
  misc_feature (39)..(39): n is a, c, g, or t
  misc_feature (45)..(45): n is a, c, g, or t
  misc_feature (48)..(48): n is a, c, g, or t
  misc_feature (54)..(54): n is a, c, g, or t
  misc_feature (57)..(57): n is a, c, g, or t
  misc_feature (60)..(60): n is a, c, g, or t
  misc_feature (63)..(63): n is a, c, g, or t
  misc_feature (66)..(66): n is a, c, g, or t
  misc_feature (69)..(69): n is a, c, g, or t
  misc_feature (72)..(72): n is a, c, g, or t
  misc_feature (75)..(75): n is a, c, g, or t
  misc_feature (78)..(78): n is a, c, g, or t
  misc_feature (84)..(84): n is a, c, g, or t
  misc_feature (87)..(87): n is a, c, g, or t
  misc_feature (90)..(90): n is a, c, g, or t
  misc_feature (93)..(93): n is a, c, g, or t
  misc_feature (102)..(102): n is a, c, g, or t
  misc_feature (111)..(111): n is a, c, g, or t
  misc_feature (114)..(114): n is a, c, g, or t
  misc_feature (120)..(120): n is a, c, g, or t
  misc_feature (126)..(126): n is a, c, g, or t
  misc_feature (129)..(129): n is a, c, g, or t
  misc_feature (138)..(138): n is a, c, g, or t
  misc_feature (141)..(141): n is a, c, g, or t
  misc_feature (144)..(144): n is a, c, g, or t
  misc_feature (147)..(147): n is a, c, g, or t
  misc_feature (153)..(153): n is a, c, g, or t
  misc_feature (156)..(156): n is a, c, g, or t
  misc_feature (162)..(162): n is a, c, g, or t
  misc_feature (165)..(165): n is a, c, g, or t
  misc_feature (168)..(168): n is a, c, g, or t
  misc_feature (174)..(174): n is a, c, g, or t
  misc_feature (180)..(180): n is a, c, g, or t
  misc_feature (183)..(183): n is a, c, g, or t
  misc_feature (186)..(186): n is a, c, g, or t
  misc_feature (192)..(192): n is a, c, g, or t
  misc_feature (201)..(201): n is a, c, g, or t
  misc_feature (210)..(210): n is a, c, g, or t
  misc_feature (213)..(213): n is a, c, g, or t
  misc_feature (216)..(216): n is a, c, g, or t
  misc_feature (219)..(219): n is a, c, g, or t
  misc_feature (222)..(222): n is a, c, g, or t
  misc_feature (228)..(228): n is a, c, g, or t
  misc_feature (237)..(237): n is a, c, g, or t
  misc_feature (240)..(240): n is a, c, g, or t
  misc_feature (246)..(246): n is a, c, g, or t
  misc_feature (252)..(252): n is a, c, g, or t
  misc_feature (258)..(258): n is a, c, g, or t
  misc_feature (267)..(267): n is a, c, g, or t
  misc_feature (273)..(273): n is a, c, g, or t
  misc_feature (282)..(282): n is a, c, g, or t
  misc_feature (291)..(291): n is a, c, g, or t
  misc_feature (294)..(294): n is a, c, g, or t
  misc_feature (300)..(300): n is a, c, g, or t
  misc_feature (303)..(303): n is a, c, g, or t
  misc_feature (306)..(306): n is a, c, g, or t
  misc_feature (309)..(309): n is a, c, g, or t
  misc_feature (312)..(312): n is a, c, g, or t
  misc_feature (318)..(318): n is a, c, g, or t
  misc_feature (321)..(321): n is a, c, g, or t
  misc_feature (324)..(324): n is a, c, g, or t
  misc_feature (327)..(327): n is a, c, g, or t
  misc_feature (330)..(330): n is a, c, g, or t
  misc_feature (336)..(336): n is a, c, g, or t
  misc_feature (345)..(345): n is a, c, g, or t
  misc_feature (354)..(354): n is a, c, g, or t
  misc_feature (363)..(363): n is a, c, g, or t
  misc_feature (372)..(372): n is a, c, g, or t
  misc_feature (381)..(381): n is a, c, g, or t
  misc_feature (390)..(390): n is a, c, g, or t
  misc_feature (396)..(396): n is a, c, g, or t
  misc_feature (399)..(399): n is a, c, g, or t
  misc_feature (405)..(405): n is a, c, g, or t
  misc_feature (408)..(408): n is a, c, g, or t
  misc_feature (411)..(411): n is a, c, g, or t
  misc_feature (417)..(417): n is a, c, g, or t
  misc_feature (426)..(426): n is a, c, g, or t
  misc_feature (432)..(432): n is a, c, g, or t
  misc_feature (435)..(435): n is a, c, g, or t
  misc_feature (444)..(444): n is a, c, g, or t
  misc_feature (453)..(453): n is a, c, g, or t
  misc_feature (456)..(456): n is a, c, g, or t
  misc_feature (462)..(462): n is a, c, g, or t
  misc_feature (468)..(468): n is a, c, g, or t
  misc_feature (471)..(471): n is a, c, g, or t
  misc_feature (480)..(480): n is a, c, g, or t
  misc_feature (486)..(486): n is a, c, g, or t
  misc_feature (489)..(489): n is a, c, g, or t
  misc_feature (492)..(492): n is a, c, g, or t
  misc_feature (498)..(498): n is a, c, g, or t
  misc_feature (501)..(501): n is a, c, g, or t
  misc_feature (504)..(504): n is a, c, g, or t
  misc_feature (507)..(507): n is a, c, g, or t
  misc_feature (510)..(510): n is a, c, g, or t
  misc_feature (516)..(516): n is a, c, g, or t
  misc_feature (522)..(522): n is a, c, g, or t
  misc_feature (525)..(525): n is a, c, g, or t
  misc_feature (534)..(534): n is a, c, g, or t
  misc_feature (543)..(543): n is a, c, g, or t
  misc_feature (549)..(549): n is a, c, g, or t
  misc_feature (552)..(552): n is a, c, g, or t
  misc_feature (555)..(555): n is a, c, g, or t
  misc_feature (558)..(558): n is a, c, g, or t
  misc_feature (561)..(561): n is a, c, g, or t
  misc_feature (564)..(564): n is a, c, g, or t
  misc_feature (567)..(567): n is a, c, g, or t
  misc_feature (570)..(570): n is a, c, g, or t
  misc_feature (573)..(573): n is a, c, g, or t
  misc_feature (576)..(576): n is a, c, g, or t
  misc_feature (579)..(579): n is a, c, g, or t
  misc_feature (582)..(582): n is a, c, g, or t
  misc_feature (588)..(588): n is a, c, g, or t
  misc_feature (597)..(597): n is a, c, g, or t
  misc_feature (606)..(606): n is a, c, g, or t
  misc_feature (609)..(609): n is a, c, g, or t
  misc_feature (612)..(612): n is a, c, g, or t
  misc_feature (615)..(615): n is a, c, g, or t
  misc_feature (618)..(618): n is a, c, g, or t
  misc_feature (621)..(621): n is a, c, g, or t
  misc_feature (624)..(624): n is a, c, g, or t
  misc_feature (633)..(633): n is a, c, g, or t
  misc_feature (636)..(636): n is a, c, g, or t
  misc_feature (639)..(639): n is a, c, g, or t
  misc_feature (642)..(642): n is a, c, g, or t
  misc_feature (651)..(651): n is a, c, g, or t
  misc_feature (654)..(654): n is a, c, g, or t
  misc_feature (660)..(660): n is a, c, g, or t
  misc_feature (666)..(666): n is a, c, g, or t
ggngaracnggncarccnggnccnaarggngargcnggnaayytnggnathccnggnccnccnggngtngtnggnccncarggnccnmgnggntayaarggngaraarggnytnaarggngarmgnggngaycarggngtnccnggntayccnggnaarccnggngcncarggngarccnggnccnaarggngayaarggnaayathggnytnggnggngtnaarggncaraarggnwsnaarggngayacntgyggnaaytgyacnaarggngaraarggngaycarggngcnatgggnwsnccnggnytncayggnggnccnggngcnaarggngaraarggngaratgggngaraarggngaratgggngayaarggntgytgyggngaywsnggngarmgnggnggnaarggncaraarggngarggnggnatgaarggngaraarggnwsnaarggngaywsnggnatggarggnaarwsnggnmgnaayggnytnccnggngcnaarggngayccnggnathaarggngaraarggngarytnggnccnccnggnytnytnggnccnacnggnccnaarggngayathggnaayaarggngtnmgnggnccnacnggnaaraarggnwsnmgnggnttyaarggnwsnaarggngarytn

SEQ ID NO: 1163 - DNA, 153 bp, Artificial Sequence
  hCol-CNA68 (emilin-1 THD)
  misc_feature (3)..(3): n is a, c, g, or t
  misc_feature (6)..(6): n is a, c, g, or t
  misc_feature (9)..(9): n is a, c, g, or t
  misc_feature (12)..(12): n is a, c, g, or t
  misc_feature (18)..(18): n is a, c, g, or t
  misc_feature (21)..(21): n is a, c, g, or t
  misc_feature (24)..(24): n is a, c, g, or t
  misc_feature (27)..(27): n is a, c, g, or t
  misc_feature (30)..(30): n is a, c, g, or t
  misc_feature (33)..(33): n is a, c, g, or t
  misc_feature (36)..(36): n is a, c, g, or t
  misc_feature (39)..(39): n is a, c, g, or t
  misc_feature (42)..(42): n is a, c, g, or t
  misc_feature (48)..(48): n is a, c, g, or t
  misc_feature (51)..(51): n is a, c, g, or t
  misc_feature (54)..(54): n is a, c, g, or t
  misc_feature (57)..(57): n is a, c, g, or t
  misc_feature (60)..(60): n is a, c, g, or t
  misc_feature (63)..(63): n is a, c, g, or t
  misc_feature (66)..(66): n is a, c, g, or t
  misc_feature (69)..(69): n is a, c, g, or t
  misc_feature (72)..(72): n is a, c, g, or t
  misc_feature (75)..(75): n is a, c, g, or t
  misc_feature (78)..(78): n is a, c, g, or t
  misc_feature (81)..(81): n is a, c, g, or t
  misc_feature (84)..(84): n is a, c, g, or t
  misc_feature (93)..(93): n is a, c, g, or t
  misc_feature (102)..(102): n is a, c, g, or t
  misc_feature (105)..(105): n is a, c, g, or t
  misc_feature (111)..(111): n is a, c, g, or t
  misc_feature (114)..(114): n is a, c, g, or t
  misc_feature (117)..(117): n is a, c, g, or t
  misc_feature (120)..(120): n is a, c, g, or t
  misc_feature (123)..(123): n is a, c, g, or t
  misc_feature (129)..(129): n is a, c, g, or t
  misc_feature (138)..(138): n is a, c, g, or t
  misc_feature (141)..(141): n is a, c, g, or t
  misc_feature (147)..(147): n is a, c, g, or t
  misc_feature (150)..(150): n is a, c, g, or t
  misc_feature (153)..(153): n is a, c, g, or t
ggnccngcnggngargcnggnccnccnggnccnccnggnytncarggnccnccnggnccngcnggnccnccnggnwsnccnggnaargayggncargarggnccnathggnccnccnggnccncarggngarcarggngtngarggngcnccn

SEQ ID NO: 1164 - DNA, 570 bp, Artificial Sequence
  hCol-CNA69 (EMI-containing 1 THD)
  misc_feature (3)..(3): n is a, c, g, or t
  misc_feature (6)..(6): n is a, c, g, or t
  misc_feature (9)..(9): n is a, c, g, or t
  misc_feature (12)..(12): n is a, c, g, or t
  misc_feature (15)..(15): n is a, c, g, or t
  misc_feature (21)..(21): n is a, c, g, or t
  misc_feature (24)..(24): n is a, c, g, or t
  misc_feature (27)..(27): n is a, c, g, or t
  misc_feature (30)..(30): n is a, c, g, or t
  misc_feature (36)..(36): n is a, c, g, or t
  misc_feature (39)..(39): n is a, c, g, or t
  misc_feature (42)..(42): n is a, c, g, or t
  misc_feature (54)..(54): n is a, c, g, or t
  misc_feature (57)..(57): n is a, c, g, or t
  misc_feature (60)..(60): n is a, c, g, or t
  misc_feature (66)..(66): n is a, c, g, or t
  misc_feature (69)..(69): n is a, c, g, or t
  misc_feature (72)..(72): n is a, c, g, or t
  misc_feature (75)..(75): n is a, c, g, or t
  misc_feature (78)..(78): n is a, c, g, or t
  misc_feature (81)..(81): n is a, c, g, or t
  misc_feature (84)..(84): n is a, c, g, or t
  misc_feature (87)..(87): n is a, c, g, or t
  misc_feature (93)..(93): n is a, c, g, or t
  misc_feature (99)..(99): n is a, c, g, or t
  misc_feature (102)..(102): n is a, c, g, or t
  misc_feature (105)..(105): n is a, c, g, or t
  misc_feature (108)..(108): n is a, c, g, or t
  misc_feature (111)..(111): n is a, c, g, or t
  misc_feature (114)..(114): n is a, c, g, or t
  misc_feature (120)..(120): n is a, c, g, or t
  misc_feature (126)..(126): n is a, c, g, or t
  misc_feature (129)..(129): n is a, c, g, or t
  misc_feature (132)..(132): n is a, c, g, or t
  misc_feature (135)..(135): n is a, c, g, or t
  misc_feature (138)..(138): n is a, c, g, or t
  misc_feature (141)..(141): n is a, c, g, or t
  misc_feature (147)..(147): n is a, c, g, or t
  misc_feature (150)..(150): n is a, c, g, or t
  misc_feature (153)..(153): n is a, c, g, or t
  misc_feature (156)..(156): n is a, c, g, or t
  misc_feature (159)..(159): n is a, c, g, or t
  misc_feature (162)..(162): n is a, c, g, or t
  misc_feature (165)..(165): n is a, c, g, or t
  misc_feature (168)..(168): n is a, c, g, or t
  misc_feature (171)..(171): n is a, c, g, or t
  misc_feature (174)..(174): n is a, c, g, or t
  misc_feature (177)..(177): n is a, c, g, or t
  misc_feature (180)..(180): n is a, c, g, or t
  misc_feature (183)..(183): n is a, c, g, or t
  misc_feature (186)..(186): n is a, c, g, or t
  misc_feature (189)..(189): n is a, c, g, or t
  misc_feature (192)..(192): n is a, c, g, or t
  misc_feature (198)..(198): n is a, c, g, or t
  misc_feature (201)..(201): n is a, c, g, or t
  misc_feature (204)..(204): n is a, c, g, or t
  misc_feature (207)..(207): n is a, c, g, or t
  misc_feature (210)..(210): n is a, c, g, or t
  misc_feature (213)..(213): n is a, c, g, or t
  misc_feature (216)..(216): n is a, c, g, or t
  misc_feature (219)..(219): n is a, c, g, or t
  misc_feature (222)..(222): n is a, c, g, or t
  misc_feature (225)..(225): n is a, c, g, or t
  misc_feature (228)..(228): n is a, c, g, or t
  misc_feature (231)..(231): n is a, c, g, or t
  misc_feature (234)..(234): n is a, c, g, or t
  misc_feature (237)..(237): n is a, c, g, or t
  misc_feature (240)..(240): n is a, c, g, or t
  misc_feature (243)..(243): n is a, c, g, or t
  misc_feature (246)..(246): n is a, c, g, or t
  misc_feature (249)..(249): n is a, c, g, or t
  misc_feature (252)..(252): n is a, c, g, or t
  misc_feature (255)..(255): n is a, c, g, or t
  misc_feature (258)..(258): n is a, c, g, or t
  misc_feature (261)..(261): n is a, c, g, or t
  misc_feature (267)..(267): n is a, c, g, or t
  misc_feature (270)..(270): n is a, c, g, or t
  misc_feature (276)..(276): n is a, c, g, or t
  misc_feature (285)..(285): n is a, c, g, or t
  misc_feature (291)..(291): n is a, c, g, or t
  misc_feature (294)..(294): n is a, c, g, or t
  misc_feature (297)..(297): n is a, c, g, or t
  misc_feature (300)..(300): n is a, c, g, or t
  misc_feature (306)..(306): n is a, c, g, or t
  misc_feature (312)..(312): n is a, c, g, or t
  misc_feature (318)..(318): n is a, c, g, or t
  misc_feature (333)..(333): n is a, c, g, or t
  misc_feature (339)..(339): n is a, c, g, or t
  misc_feature (342)..(342): n is a, c, g, or t
  misc_feature (345)..(345): n is a, c, g, or t
  misc_feature (348)..(348): n is a, c, g, or t
  misc_feature (351)..(351): n is a, c, g, or t
  misc_feature (354)..(354): n is a, c, g, or t
  misc_feature (357)..(357): n is a, c, g, or t
  misc_feature (360)..(360): n is a, c, g, or t
  misc_feature (363)..(363): n is a, c, g, or t
  misc_feature (366)..(366): n is a, c, g, or t
  misc_feature (369)..(369): n is a, c, g, or t
  misc_feature (375)..(375): n is a, c, g, or t
  misc_feature (378)..(378): n is a, c, g, or t
  misc_feature (381)..(381): n is a, c, g, or t
  misc_feature (384)..(384): n is a, c, g, or t
  misc_feature (387)..(387): n is a, c, g, or t
  misc_feature (390)..(390): n is a, c, g, or t
  misc_feature (393)..(393): n is a, c, g, or t
  misc_feature (396)..(396): n is a, c, g, or t
  misc_feature (399)..(399): n is a, c, g, or t
  misc_feature (402)..(402): n is a, c, g, or t
  misc_feature (405)..(405): n is a, c, g, or t
  misc_feature (408)..(408): n is a, c, g, or t
  misc_feature (411)..(411): n is a, c, g, or t
  misc_feature (414)..(414): n is a, c, g, or t
  misc_feature (417)..(417): n is a, c, g, or t
  misc_feature (420)..(420): n is a, c, g, or t
  misc_feature (429)..(429): n is a, c, g, or t
  misc_feature (432)..(432): n is a, c, g, or t
  misc_feature (435)..(435): n is a, c, g, or t
  misc_feature (438)..(438): n is a, c, g, or t
  misc_feature (441)..(441): n is a, c, g, or t
  misc_feature (444)..(444): n is a, c, g, or t
  misc_feature (447)..(447): n is a, c, g, or t
  misc_feature (450)..(450): n is a, c, g, or t
  misc_feature (456)..(456): n is a, c, g, or t
  misc_feature (462)..(462): n is a, c, g, or t
  misc_feature (465)..(465): n is a, c, g, or t
  misc_feature (471)..(471): n is a, c, g, or t
  misc_feature (474)..(474): n is a, c, g, or t
  misc_feature (483)..(483): n is a, c, g, or t
  misc_feature (489)..(489): n is a, c, g, or t
  misc_feature (492)..(492): n is a, c, g, or t
  misc_feature (495)..(495): n is a, c, g, or t
  misc_feature (498)..(498): n is a, c, g, or t
  misc_feature (501)..(501): n is a, c, g, or t
  misc_feature (507)..(507): n is a, c, g, or t
  misc_feature (510)..(510): n is a, c, g, or t
  misc_feature (513)..(513): n is a, c, g, or t
  misc_feature (519)..(519): n is a, c, g, or t
  misc_feature (522)..(522): n is a, c, g, or t
  misc_feature (525)..(525): n is a, c, g, or t
  misc_feature (528)..(528): n is a, c, g, or t
  misc_feature (534)..(534): n is a, c, g, or t
  misc_feature (537)..(537): n is a, c, g, or t
  misc_feature (543)..(543): n is a, c, g, or t
  misc_feature (546)..(546): n is a, c, g, or t
  misc_feature (549)..(549): n is a, c, g, or t
  misc_feature (555)..(555): n is a, c, g, or t
  misc_feature (561)..(561): n is a, c, g, or t
  misc_feature (564)..(564): n is a, c, g, or t
ggnccnccnccngcncarggnwsnccnggngayggnggnytncargaycargtnggngcntggggnytnccnggnccnacnggnccnaarggngaygcnggnwsnmgnggnccnatgggnatgmgnggnccnccnggnccncarggnccnccnggnwsnccnggnmgngcnggngcngtnggnacnccnggngarmgnggnccnccnggnccnccnggnccnccnggnccnccnggnccnccngcnccngtnggnccnccncaygcnmgnathwsncarcayggngayccnytnytnwsnaayacnttyacngaracnaayaaycaytggccncarggnccnacnggnccnccnggnccnccnggnccnatgggnccnccnggnccnccnggnccnacnggngtnccnggnwsnccnggncayathggnccnccnggnccnacnggnccnaarggnathwsnggncayccnggngaraarggngarmgnggnytnmgnggngarccnggnccncarggnwsngcnggncarmgnggngarccnggnccnaarggngayccnggngaraar

SEQ ID NO: 1165 - DNA, 177 bp, Artificial Sequence
  hCol-CNA70 (mannose binding protein 1 THD)
  misc_feature (3)..(3): n is a, c, g, or t
  misc_feature (12)..(12): n is a, c, g, or t
  misc_feature (18)..(18): n is a, c, g, or t
  misc_feature (21)..(21): n is a, c, g, or t
  misc_feature (30)..(30): n is a, c, g, or t
  misc_feature (33)..(33): n is a, c, g, or t
  misc_feature (39)..(39): n is a, c, g, or t
  misc_feature (42)..(42): n is a, c, g, or t
  misc_feature (48)..(48): n is a, c, g, or t
  misc_feature (57)..(57): n is a, c, g, or t
  misc_feature (63)..(63): n is a, c, g, or t
  misc_feature (66)..(66): n is a, c, g, or t
  misc_feature (72)..(72): n is a, c, g, or t
  misc_feature (75)..(75): n is a, c, g, or t
  misc_feature (78)..(78): n is a, c, g, or t
  misc_feature (81)..(81): n is a, c, g, or t
  misc_feature (84)..(84): n is a, c, g, or t
  misc_feature (90)..(90): n is a, c, g, or t
  misc_feature (93)..(93): n is a, c, g, or t
  misc_feature (96)..(96): n is a, c, g, or t
  misc_feature (99)..(99): n is a, c, g, or t
  misc_feature (105)..(105): n is a, c, g, or t
  misc_feature (108)..(108): n is a, c, g, or t
  misc_feature (111)..(111): n is a, c, g, or t
  misc_feature (114)..(114): n is a, c, g, or t
  misc_feature (117)..(117): n is a, c, g, or t
  misc_feature (123)..(123): n is a, c, g, or t
  misc_feature (126)..(126): n is a, c, g, or t
  misc_feature (129)..(129): n is a, c, g, or t
  misc_feature (132)..(132): n is a, c, g, or t
  misc_feature (135)..(135): n is a, c, g, or t
  misc_feature (138)..(138): n is a, c, g, or t
  misc_feature (141)..(141): n is a, c, g, or t
  misc_feature (144)..(144): n is a, c, g, or t
  misc_feature (147)..(147): n is a, c, g, or t
  misc_feature (153)..(153): n is a, c, g, or t
  misc_feature (162)..(162): n is a, c, g, or t
  misc_feature (168)..(168): n is a, c, g, or t
  misc_feature (171)..(171): n is a, c, g, or t
  misc_feature (177)..(177): n is a, c, g, or t
ggnathaayggnttyccnggnaargayggnmgngayggnacnaarggngaraarggngarccnggncarggnytnmgnggnytncarggnccnccnggnaarytnggnccnccnggnaayccnggnccnwsnggnwsnccnggnccnaarggncaraarggngayccnggnaarwsn

SEQ ID NO: 1166 - DNA, 219 bp, Artificial Sequence
  hCol-CNA71 (pulmonary surfactant protein A1 THD)
  misc_feature (3)..(3): n is a, c, g, or t
  misc_feature (6)..(6): n is a, c, g, or t
  misc_feature (9)..(9): n is a, c, g, or t
  misc_feature (12)..(12): n is a, c, g, or t
  misc_feature (18)..(18): n is a, c, g, or t
  misc_feature (21)..(21): n is a, c, g, or t
  misc_feature (24)..(24): n is a, c, g, or t
  misc_feature (27)..(27): n is a, c, g, or t
  misc_feature (30)..(30): n is a, c, g, or t
  misc_feature (33)..(33): n is a, c, g, or t
  misc_feature (39)..(39): n is a, c, g, or t
  misc_feature (42)..(42): n is a, c, g, or t
  misc_feature (45)..(45): n is a, c, g, or t
  misc_feature (48)..(48): n is a, c, g, or t
  misc_feature (51)..(51): n is a, c, g, or t
  misc_feature (57)..(57): n is a, c, g, or t
  misc_feature (60)..(60): n is a, c, g, or t
  misc_feature (66)..(66): n is a, c, g, or t
  misc_feature (69)..(69): n is a, c, g, or t
  misc_feature (75)..(75): n is a, c, g, or t
  misc_feature (81)..(81): n is a, c, g, or t
  misc_feature (84)..(84): n is a, c, g, or t
  misc_feature (87)..(87): n is a, c, g, or t
  misc_feature (90)..(90): n is a, c, g, or t
  misc_feature (93)..(93): n is a, c, g, or t
  misc_feature (96)..(96): n is a, c, g, or t
  misc_feature (102)..(102): n is a, c, g, or t
  misc_feature (105)..(105): n is a, c, g, or t
  misc_feature (108)..(108): n is a, c, g, or t
  misc_feature (111)..(111): n is a, c, g, or t
  misc_feature (120)..(120): n is a, c, g, or t
  misc_feature (126)..(126): n is a, c, g, or t
  misc_feature (129)..(129): n is a, c, g, or t
  misc_feature (132)..(132): n is a, c, g, or t
  misc_feature (141)..(141): n is a, c, g, or t
  misc_feature (144)..(144): n is a, c, g, or t
  misc_feature (147)..(147): n is a, c, g, or t
  misc_feature (150)..(150): n is a, c, g, or t
  misc_feature (153)..(153): n is a, c, g, or t
  misc_feature (156)..(156): n is a, c, g, or t
  misc_feature (159)..(159): n is a, c, g, or t
  misc_feature (165)..(165): n is a, c, g, or t
  misc_feature (168)..(168): n is a, c, g, or t
  misc_feature (177)..(177): n is a, c, g, or t
  misc_feature (186)..(186): n is a, c, g, or t
  misc_feature (192)..(192): n is a, c, g, or t
  misc_feature (195)..(195): n is a, c, g, or t
  misc_feature (201)..(201): n is a, c, g, or t
  misc_feature (204)..(204): n is a, c, g, or t
  misc_feature (207)..(207): n is a, c, g, or t
  misc_feature (210)..(210): n is a, c, g, or t
  misc_feature (213)..(213): n is a, c, g, or t
  misc_feature (216)..(216): n is a, c, g, or t
  misc_feature (219)..(219): n is a, c, g, or t
ggnwsnccnggnathccnggnacnccnggnwsncayggnytnccnggnmgngayggnmgngayggnytnaarggngayccnggnccnccnggnccnatgggnccnccnggngaratgccntgyccnccnggnaaygayggnytnccnggngcnccnggnathccnggngartgyggngaraarggngarccnggngarmgnggnccnccnggnytnccn

SEQ ID NO: 1167 - DNA, 219 bp, Artificial Sequence
  hCol-CNA72 (pulmonary surfactant protein A2 THD)
  misc_feature (3)..(3): n is a, c, g, or t
  misc_feature (6)..(6): n is a, c, g, or t
  misc_feature (9)..(9): n is a, c, g, or t
  misc_feature (12)..(12): n is a, c, g, or t
  misc_feature (18)..(18): n is a, c, g, or t
  misc_feature (21)..(21): n is a, c, g, or t
  misc_feature (24)..(24): n is a, c, g, or t
  misc_feature (27)..(27): n is a, c, g, or t
  misc_feature (30)..(30): n is a, c, g, or t
  misc_feature (33)..(33): n is a, c, g, or t
  misc_feature (39)..(39): n is a, c, g, or t
  misc_feature (42)..(42): n is a, c, g, or t
  misc_feature (45)..(45): n is a, c, g, or t
  misc_feature (48)..(48): n is a, c, g, or t
  misc_feature (51)..(51): n is a, c, g, or t
  misc_feature (57)..(57): n is a, c, g, or t
  misc_feature (60)..(60): n is a, c, g, or t
  misc_feature (66)..(66): n is a, c, g, or t
  misc_feature (69)..(69): n is a, c, g, or t
  misc_feature (75)..(75): n is a, c, g, or t
  misc_feature (81)..(81): n is a, c, g, or t
  misc_feature (84)..(84): n is a, c, g, or t
  misc_feature (87)..(87): n is a, c, g, or t
  misc_feature (90)..(90): n is a, c, g, or t
  misc_feature (93)..(93): n is a, c, g, or t
  misc_feature (96)..(96): n is a, c, g, or t
  misc_feature (102)..(102): n is a, c, g, or t
  misc_feature (105)..(105): n is a, c, g, or t
  misc_feature (108)..(108): n is a, c, g, or t
  misc_feature (111)..(111): n is a, c, g, or t
  misc_feature (117)..(117): n is a, c, g, or t
  misc_feature (120)..(120): n is a, c, g, or t
  misc_feature (126)..(126): n is a, c, g, or t
  misc_feature (129)..(129): n is a, c, g, or t
  misc_feature (132)..(132): n is a, c, g, or t
  misc_feature (141)..(141): n is a, c, g, or t
  misc_feature (144)..(144): n is a, c, g, or t
  misc_feature (147)..(147): n is a, c, g, or t
  misc_feature (150)..(150): n is a, c, g, or t
  misc_feature (153)..(153): n is a, c, g, or t
  misc_feature (156)..(156): n is a, c, g, or t
  misc_feature (159)..(159): n is a, c, g, or t
  misc_feature (162)..(162): n is a, c, g, or t
  misc_feature (165)..(165): n is a, c, g, or t
  misc_feature (168)..(168): n is a, c, g, or t
  misc_feature (174)..(174): n is a, c, g, or t
  misc_feature (177)..(177): n is a, c, g, or t
  misc_feature (186)..(186): n is a, c, g, or t
  misc_feature (192)..(192): n is a, c, g, or t
  misc_feature (195)..(195): n is a, c, g, or t
  misc_feature (201)..(201): n is a, c, g, or t
  misc_feature (204)..(204): n is a, c, g, or t
  misc_feature (207)..(207): n is a, c, g, or t
  misc_feature (210)..(210): n is a, c, g, or t
  misc_feature (213)..(213): n is a, c, g, or t
  misc_feature (216)..(216): n is a, c, g, or t
  misc_feature (219)..(219): n is a, c, g, or t
ggnwsnccnggnathccnggnacnccnggnwsncayggnytnccnggnmgngayggnmgngayggngtnaarggngayccnggnccnccnggnccnatgggnccnccnggngaracnccntgyccnccnggnaayaayggnytnccnggngcnccnggngtnccnggngarmgnggngaraarggngargcnggngarmgnggnccnccnggnytnccn

SEQ ID NO: 1168 - DNA, 531 bp, Artificial Sequence
  hCol-CNA73 (pulmonary surfactant protein D THD)
  misc_feature (3)..(3): n is a, c, g, or t
  misc_feature (6)..(6): n is a, c, g, or t
  misc_feature (9)..(9): n is a, c, g, or t
  misc_feature (12)..(12): n is a, c, g, or t
  misc_feature (15)..(15): n is a, c, g, or t
  misc_feature (21)..(21): n is a, c, g, or t
  misc_feature (24)..(24): n is a, c, g, or t
  misc_feature (30)..(30): n is a, c, g, or t
  misc_feature (33)..(33): n is a, c, g, or t
  misc_feature (39)..(39): n is a, c, g, or t
  misc_feature (42)..(42): n is a, c, g, or t
  misc_feature (45)..(45): n is a, c, g, or t
  misc_feature (48)..(48): n is a, c, g, or t
  misc_feature (57)..(57): n is a, c, g, or t
  misc_feature (63)..(63): n is a, c, g, or t
  misc_feature (66)..(66): n is a, c, g, or t
  misc_feature (69)..(69): n is a, c, g, or t
  misc_feature (72)..(72): n is a, c, g, or t
  misc_feature (75)..(75): n is a, c, g, or t
  misc_feature (78)..(78): n is a, c, g, or t
  misc_feature (81)..(81): n is a, c, g, or t
  misc_feature (84)..(84): n is a, c, g, or t
  misc_feature (90)..(90): n is a, c, g, or t
  misc_feature (93)..(93): n is a, c, g, or t
  misc_feature (99)..(99): n is a, c, g, or t
  misc_feature (102)..(102): n is a, c, g, or t
  misc_feature (108)..(108): n is a, c, g, or t
  misc_feature (111)..(111): n is a, c, g, or t
  misc_feature (114)..(114): n is a, c, g, or t
  misc_feature (117)..(117): n is a, c, g, or t
  misc_feature (120)..(120): n is a, c, g, or t
  misc_feature (123)..(123): n is a, c, g, or t
  misc_feature (129)..(129): n is a, c, g, or t
  misc_feature (138)..(138): n is a, c, g, or t
  misc_feature (141)..(141): n is a, c, g, or t
  misc_feature (144)..(144): n is a, c, g, or t
  misc_feature (147)..(147): n is a, c, g, or t
  misc_feature (153)..(153): n is a, c, g, or t
  misc_feature (156)..(156): n is a, c, g, or t
  misc_feature (159)..(159): n is a, c, g, or t
  misc_feature (165)..(165): n is a, c, g, or t
  misc_feature (171)..(171): n is a, c, g, or t
  misc_feature (174)..(174): n is a, c, g, or t
  misc_feature (177)..(177): n is a, c, g, or t
  misc_feature (180)..(180): n is a, c, g, or t
  misc_feature (183)..(183): n is a, c, g, or t
  misc_feature (186)..(186): n is a, c, g, or t
  misc_feature (189)..(189): n is a, c, g, or t
  misc_feature (192)..(192): n is a, c, g, or t
  misc_feature (195)..(195): n is a, c, g, or t
  misc_feature (198)..(198): n is a, c, g, or t
  misc_feature (201)..(201): n is a, c, g, or t
  misc_feature (204)..(204): n is a, c, g, or t
  misc_feature (207)..(207): n is a, c, g, or t
  misc_feature (210)..(210): n is a, c, g, or t
  misc_feature (213)..(213): n is a, c, g, or t
  misc_feature (216)..(216): n is a, c, g, or t
  misc_feature (219)..(219): n is a, c, g, or t
  misc_feature (222)..(222): n is a, c, g, or t
  misc_feature (228)..(228): n is a, c, g, or t
  misc_feature (231)..(231): n is a, c, g, or t
  misc_feature (234)..(234): n is a, c, g, or t
  misc_feature (237)..(237): n is a, c, g, or t
  misc_feature (246)..(246): n is a, c, g, or t
  misc_feature (255)..(255): n is a, c, g, or t
  misc_feature (258)..(258): n is a, c, g, or t
  misc_feature (264)..(264): n is a, c, g, or t
  misc_feature (270)..(270): n is a, c, g, or t
  misc_feature (273)..(273): n is a, c, g, or t
  misc_feature (276)..(276): n is a, c, g, or t
  misc_feature (282)..(282): n is a, c, g, or t
  misc_feature (288)..(288): n is a, c, g, or t
  misc_feature (291)..(291): n is a, c, g, or t
  misc_feature (294)..(294): n is a, c, g, or t
  misc_feature (300)..(300): n is a, c, g, or t
  misc_feature (306)..(306): n is a, c, g, or t
  misc_feature (309)..(309): n is a, c, g, or t
  misc_feature (312)..(312): n is a, c, g, or t
  misc_feature (315)..(315): n is a, c, g, or t
  misc_feature (318)..(318): n is a, c, g, or t
  misc_feature (327)..(327): n is a, c, g, or t
  misc_feature (330)..(330): n is a, c, g, or t
  misc_feature (333)..(333): n is a, c, g, or t
  misc_feature (336)..(336): n is a, c, g, or t
  misc_feature (339)..(339): n is a, c, g, or t
  misc_feature (342)..(342): n is a, c, g, or t
  misc_feature (345)..(345): n is a, c, g, or t
  misc_feature (348)..(348): n is a, c, g, or t
  misc_feature (351)..(351): n is a, c, g, or t
  misc_feature (354)..(354): n is a, c, g, or t
  misc_feature (357)..(357): n is a, c, g, or t
  misc_feature (363)..(363): n is a, c, g, or t
  misc_feature (369)..(369): n is a, c, g, or t
  misc_feature (372)..(372): n is a, c, g, or t
  misc_feature (375)..(375): n is a, c, g, or t
  misc_feature (378)..(378): n is a, c, g, or t
  misc_feature (381)..(381): n is a, c, g, or t
  misc_feature (387)..(387): n is a, c, g, or t
  misc_feature (390)..(390): n is a, c, g, or t
  misc_feature (393)..(393): n is a, c, g, or t
  misc_feature (396)..(396): n is a, c, g, or t
  misc_feature (399)..(399): n is a, c, g, or t
  misc_feature (405)..(405): n is a, c, g, or t
  misc_feature (408)..(408): n is a, c, g, or t
  misc_feature (411)..(411): n is a, c, g, or t
  misc_feature (414)..(414): n is a, c, g, or t
  misc_feature (417)..(417): n is a, c, g, or t
  misc_feature (420)..(420): n is a, c, g, or t
  misc_feature (423)..(423): n is a, c, g, or t
  misc_feature (426)..(426): n is a, c, g, or t
  misc_feature (429)..(429): n is a, c, g, or t
  misc_feature (435)..(435): n is a, c, g, or t
  misc_feature (438)..(438): n is a, c, g, or t
  misc_feature (444)..(444): n is a, c, g, or t
  misc_feature (447)..(447): n is a, c, g, or t
  misc_feature (450)..(450): n is a, c, g, or t
  misc_feature (453)..(453): n is a, c, g, or t
  misc_feature (456)..(456): n is a, c, g, or t
  misc_feature (459)..(459): n is a, c, g, or t
  misc_feature (462)..(462): n is a, c, g, or t
  misc_feature (465)..(465): n is a, c, g, or t
  misc_feature (468)..(468): n is a, c, g, or t
  misc_feature (471)..(471): n is a, c, g, or t
  misc_feature (474)..(474): n is a, c, g, or t
  misc_feature (480)..(480): n is a, c, g, or t
  misc_feature (489)..(489): n is a, c, g, or t
  misc_feature (495)..(495): n is a, c, g, or t
  misc_feature (498)..(498): n is a, c, g, or t
  misc_feature (507)..(507): n is a, c, g, or t
  misc_feature (510)..(510): n is a, c, g, or t
  misc_feature (516)..(516): n is a, c, g, or t
  misc_feature (522)..(522): n is a, c, g, or t
  misc_feature (525)..(525): n is a, c, g, or t
  misc_feature (528)..(528): n is a, c, g, or t
  misc_feature (531)..(531): n is a, c, g, or t
ggnytnccnggnmgngayggnmgngayggnmgngarggnccnmgnggngaraarggngayccnggnytnccnggngcngcnggncargcnggnatgccnggncargcnggnccngtnggnccnaarggngayaayggnwsngtnggngarccnggnccnaarggngayacnggnccnwsnggnccnccnggnccnccnggngtnccnggnccngcnggnmgngarggnccnytnggnaarcarggnaayathggnccncarggnaarccnggnccnaarggngargcnggnccnaarggngargtnggngcnccnggnatgcarggnwsngcnggngcnmgnggnytngcnggnccnaarggngarmgnggngtnccnggngarmgnggngtnccnggnaaygcnggngcngcnggnwsngcnggngcnatgggnccncarggnwsnccnggngcnmgnggnccnccnggnytnaarggngayaarggnathccnggngayaarggngcnaarggngarwsnggnytnccn

SEQ ID NO: 1169 - DNA, 198 bp, Artificial Sequence
  hCol-CNA74 (collectin-10 THD)
  misc_feature (3)..(3): n is a, c, g, or t
  misc_feature (12)..(12): n is a, c, g, or t
  misc_feature (18)..(18): n is a, c, g, or t
  misc_feature (21)..(21): n is a, c, g, or t
  misc_feature (30)..(30): n is a, c, g, or t
  misc_feature (39)..(39): n is a, c, g, or t
  misc_feature (45)..(45): n is a, c, g, or t
  misc_feature (48)..(48): n is a, c, g, or t
  misc_feature (51)..(51): n is a, c, g, or t
  misc_feature (57)..(57): n is a, c, g, or t
  misc_feature (60)..(60): n is a, c, g, or t
  misc_feature (66)..(66): n is a, c, g, or t
  misc_feature (75)..(75): n is a, c, g, or t
  misc_feature (81)..(81): n is a, c, g, or t
  misc_feature (84)..(84): n is a, c, g, or t
  misc_feature (93)..(93): n is a, c, g, or t
  misc_feature (102)..(102): n is a, c, g, or t
  misc_feature (111)..(111): n is a, c, g, or t
  misc_feature (117)..(117): n is a, c, g, or t
  misc_feature (120)..(120): n is a, c, g, or t
  misc_feature (123)..(123): n is a, c, g, or t
  misc_feature (129)..(129): n is a, c, g, or t
  misc_feature (138)..(138): n is a, c, g, or t
  misc_feature (147)..(147): n is a, c, g, or t
  misc_feature (156)..(156): n is a, c, g, or t
  misc_feature (159)..(159): n is a, c, g, or t
  misc_feature (162)..(162): n is a, c, g, or t
  misc_feature (165)..(165): n is a, c, g, or t
  misc_feature (171)..(171): n is a, c, g, or t
  misc_feature (174)..(174): n is a, c, g, or t
  misc_feature (183)..(183): n is a, c, g, or t
  misc_feature (189)..(189): n is a, c, g, or t
  misc_feature (192)..(192): n is a, c, g, or t
  misc_feature (195)..(195): n is a, c, g, or t
  misc_feature (198)..(198): n is a, c, g, or t
ggngaraarggngayccnggngargarggnaarcayggnaargtnggnmgnatgggnccnaarggnathaarggngarytnggngayatgggngaycarggnaayathggnaaracnggnccnathggnaaraarggngayaarggngaraarggnytnytnggnathccnggngaraarggnaargcnggnacngtn

SEQ ID NO: 1170 - DNA, 216 bp, Artificial Sequence
  hCol-CNA75 (collectin-11 THD)
  misc_feature (3)..(3): n is a, c, g, or t
  misc_feature (6)..(6): n is a, c, g, or t
  misc_feature (12)..(12): n is a, c, g, or t
  misc_feature (18)..(18): n is a, c, g, or t
  misc_feature (21)..(21): n is a, c, g, or t
  misc_feature (30)..(30): n is a, c, g, or t
  misc_feature (39)..(39): n is a, c, g, or t
  misc_feature (42)..(42): n is a, c, g, or t
  misc_feature (45)..(45): n is a, c, g, or t
  misc_feature (48)..(48): n is a, c, g, or t
  misc_feature (51)..(51): n is a, c, g, or t
  misc_feature (54)..(54): n is a, c, g, or t
  misc_feature (57)..(57): n is a, c, g, or t
  misc_feature (60)..(60): n is a, c, g, or t
  misc_feature (63)..(63): n is a, c, g, or t
  misc_feature (66)..(66): n is a, c, g, or t
  misc_feature (69)..(69): n is a, c, g, or t
  misc_feature (72)..(72): n is a, c, g, or t
  misc_feature (75)..(75): n is a, c, g, or t
  misc_feature (84)..(84): n is a, c, g, or t
  misc_feature (93)..(93): n is a, c, g, or t
  misc_feature (102)..(102): n is a, c, g, or t
  misc_feature (111)..(111): n is a, c, g, or t
  misc_feature (114)..(114): n is a, c, g, or t
  misc_feature (117)..(117): n is a, c, g, or t
  misc_feature (120)..(120): n is a, c, g, or t
  misc_feature (123)..(123): n is a, c, g, or t
  misc_feature (129)..(129): n is a, c, g, or t
  misc_feature (138)..(138): n is a, c, g, or t
  misc_feature (141)..(141): n is a, c, g, or t
  misc_feature (147)..(147): n is a, c, g, or t
  misc_feature (150)..(150): n is a, c, g, or t
  misc_feature (156)..(156): n is a, c, g, or t
  misc_feature (165)..(165): n is a, c, g, or t
  misc_feature (171)..(171): n is a, c, g, or t
  misc_feature (174)..(174): n is a, c, g, or t
  misc_feature (183)..(183): n is a, c, g, or t
  misc_feature (186)..(186): n is a, c, g, or t
  misc_feature (189)..(189): n is a, c, g, or t
  misc_feature (192)..(192): n is a, c, g, or t
  misc_feature (195)..(195): n is a, c, g, or t
  misc_feature (201)..(201): n is a, c, g, or t
  misc_feature (207)..(207): n is a, c, g, or t
  misc_feature (210)..(210): n is a, c, g, or t
  misc_feature (213)..(213): n is a, c, g, or t
  misc_feature (216)..(216): n is a, c, g, or t
ggnytnaarggngaygcnggngaraarggngayaarggngcnccnggnmgnccnggnmgngtnggnccnacnggngaraarggngayatgggngayaarggncaraarggnwsngtnggnmgncayggnaarathggnccnathggnwsnaarggngaraarggngaywsnggngayathggnccnccnggnccnaayggngarccnggnytnccn

SEQ ID NO: 1171 - DNA, 171 bp, Artificial Sequence
  hCol-CNA76 (ficolin-1 THD)
  misc_feature (3)..(3): n is a, c, g, or t
  misc_feature (9)..(9): n is a, c, g, or t
  misc_feature (12)..(12): n is a, c, g, or t
  misc_feature (15)..(15): n is a, c, g, or t
  misc_feature (18)..(18): n is a, c, g, or t
  misc_feature (21)..(21): n is a, c, g, or t
  misc_feature (24)..(24): n is a, c, g, or t
  misc_feature (27)..(27): n is a, c, g, or t
  misc_feature (30)..(30): n is a, c, g, or t
  misc_feature (33)..(33): n is a, c, g, or t
  misc_feature (39)..(39): n is a, c, g, or t
  misc_feature (45)..(45): n is a, c, g, or t
  misc_feature (48)..(48): n is a, c, g, or t
  misc_feature (51)..(51): n is a, c, g, or t
  misc_feature (57)..(57): n is a, c, g, or t
  misc_feature (63)..(63): n is a, c, g, or t
  misc_feature (66)..(66): n is a, c, g, or t
  misc_feature (72)..(72): n is a, c, g, or t
  misc_feature (75)..(75): n is a, c, g, or t
  misc_feature (78)..(78): n is a, c, g, or t
  misc_feature (81)..(81): n is a, c, g, or t
  misc_feature (84)..(84): n is a, c, g, or t
  misc_feature (87)..(87): n is a, c, g, or t
  misc_feature (90)..(90): n is a, c, g, or t
  misc_feature (93)..(93): n is a, c, g, or t
  misc_feature (99)..(99): n is a, c, g, or t
  misc_feature (102)..(102): n is a, c, g, or t
  misc_feature (105)..(105): n is a, c, g, or t
  misc_feature (108)..(108): n is a, c, g, or t
  misc_feature (111)..(111): n is a, c, g, or t
  misc_feature (114)..(114): n is a, c, g, or t
  misc_feature (120)..(120): n is a, c, g, or t
  misc_feature (126)..(126): n is a, c, g, or t
  misc_feature (129)..(129): n is a, c, g, or t
  misc_feature (138)..(138): n is a, c, g, or t
  misc_feature (144)..(144): n is a, c, g, or t
  misc_feature (147)..(147): n is a, c, g, or t
  misc_feature (156)..(156): n is a, c, g, or t
  misc_feature (162)..(162): n is a, c, g, or t
  misc_feature (165)..(165): n is a, c, g, or t
  misc_feature (171)..(171): n is a, c, g, or t
ggntgyccnggnytnccnggngcnccnggnccnaarggngargcnggngtnathggngarmgnggngarmgnggnytnccnggngcnccnggnaargcnggnccngtnggnccnaarggngaymgnggngaraarggnatgmgnggngaraarggngaygcnggncarwsn

SEQ ID NO: 1172 - DNA, 135 bp, Artificial Sequence
  hCol-CNA77 (ficolin-2 THD)
  misc_feature (3)..(3): n is a, c, g, or t
  misc_feature (9)..(9): n is a, c, g, or t
  misc_feature (12)..(12): n is a, c, g, or t
  misc_feature (15)..(15): n is a, c, g, or t
  misc_feature (18)..(18): n is a, c, g, or t
  misc_feature (21)..(21): n is a, c, g, or t
  misc_feature (24)..(24): n is a, c, g, or t
  misc_feature (27)..(27): n is a, c, g, or t
  misc_feature (30)..(30): n is a, c, g, or t
  misc_feature (33)..(33): n is a, c, g, or t
  misc_feature (39)..(39): n is a, c, g, or t
  misc_feature (45)..(45): n is a, c, g, or t
  misc_feature (48)..(48): n is a, c, g, or t
  misc_feature (51)..(51): n is a, c, g, or t
  misc_feature (57)..(57): n is a, c, g, or t
  misc_feature (63)..(63): n is a, c, g, or t
  misc_feature (66)..(66): n is a, c, g, or t
  misc_feature (72)..(72): n is a, c, g, or t
  misc_feature (75)..(75): n is a, c, g, or t
  misc_feature (78)..(78): n is a, c, g, or t
  misc_feature (81)..(81): n is a, c, g, or t
  misc_feature (84)..(84): n is a, c, g, or t
  misc_feature (87)..(87): n is a, c, g, or t
  misc_feature (90)..(90): n is a, c, g, or t
  misc_feature (93)..(93): n is a, c, g, or t
  misc_feature (99)..(99): n is a, c, g, or t
  misc_feature (102)..(102): n is a, c, g, or t
  misc_feature (105)..(105): n is a, c, g, or t
  misc_feature (108)..(108): n is a, c, g, or t
  misc_feature (111)..(111): n is a, c, g, or t
  misc_feature (114)..(114): n is a, c, g, or t
  misc_feature (120)..(120): n is a, c, g, or t
  misc_feature (123)..(123): n is a, c, g, or t
  misc_feature (126)..(126): n is a, c, g, or t
  misc_feature (129)..(129): n is a, c, g, or t
  misc_feature (135)..(135): n is a, c, g, or t
ggntgyccnggnytnccnggngcnccnggnccnaarggngargcnggnacnaayggnaarmgnggngarmgnggnccnccnggnccnccnggnaargcnggnccnccnggnccnaayggngcnccnggngarccn

SEQ ID NO: 1173 - DNA, 99 bp, Artificial Sequence
  hCol-CNA78 (ficolin-3 THD)
  misc_feature (3)..(3): n is a, c, g, or t
  misc_feature (6)..(6): n is a, c, g, or t
  misc_feature (9)..(9): n is a, c, g, or t
  misc_feature (12)..(12): n is a, c, g, or t
  misc_feature (15)..(15): n is a, c, g, or t
  misc_feature (18)..(18): n is a, c, g, or t
  misc_feature (21)..(21): n is a, c, g, or t
  misc_feature (30)..(30): n is a, c, g, or t
  misc_feature (33)..(33): n is a, c, g, or t
  misc_feature (36)..(36): n is a, c, g, or t
  misc_feature (39)..(39): n is a, c, g, or t
  misc_feature (42)..(42): n is a, c, g, or t
  misc_feature (48)..(48): n is a, c, g, or t
  misc_feature (51)..(51): n is a, c, g, or t
  misc_feature (54)..(54): n is a, c, g, or t
  misc_feature (57)..(57): n is a, c, g, or t
  misc_feature (60)..(60): n is a, c, g, or t
  misc_feature (63)..(63): n is a, c, g, or t
  misc_feature (66)..(66): n is a, c, g, or t
  misc_feature (75)..(75): n is a, c, g, or t
  misc_feature (78)..(78): n is a, c, g, or t
  misc_feature (84)..(84): n is a, c, g, or t
  misc_feature (90)..(90): n is a, c, g, or t
  misc_feature (93)..(93): n is a, c, g, or t
  misc_feature (99)..(99): n is a, c, g, or t
ggngcnccnggnwsnccnggngaraarggngcnccnggnccncarggnccnccnggnccnccnggnaaratgggnccnaarggngarccnggngayccn

SEQ ID NO: 1174 - DNA, 207 bp, Artificial Sequence
  hCol-CNA79 (macrophage scavenger receptor 1 THD)
  misc_feature (3)..(3): n is a, c, g, or t
  misc_feature (6)..(6): n is a, c, g, or t
  misc_feature (9)..(9): n is a, c, g, or t
  misc_feature (12)..(12): n is a, c, g, or t
  misc_feature (15)..(15): n is a, c, g, or t
  misc_feature (18)..(18): n is a, c, g, or t
  misc_feature (21)..(21): n is a, c, g, or t
  misc_feature (30)..(30): n is a, c, g, or t
  misc_feature (36)..(36): n is a, c, g, or t
  misc_feature (39)..(39): n is a, c, g, or t
  misc_feature (42)..(42): n is a, c, g, or t
  misc_feature (45)..(45): n is a, c, g, or t
  misc_feature (48)..(48): n is a, c, g, or t
  misc_feature (54)..(54): n is a, c, g, or t
  misc_feature (57)..(57): n is a, c, g, or t
  misc_feature (60)..(60): n is a, c, g, or t
  misc_feature (63)..(63): n is a, c, g, or t
  misc_feature (66)..(66): n is a, c, g, or t
  misc_feature (72)..(72): n is a, c, g, or t
  misc_feature (75)..(75): n is a, c, g, or t
  misc_feature (78)..(78): n is a, c, g, or t
  misc_feature (84)..(84): n is a, c, g, or t
  misc_feature (87)..(87): n is a, c, g, or t
  misc_feature (90)..(90): n is a, c, g, or t
  misc_feature (93)..(93): n is a, c, g, or t
  misc_feature (96)..(96): n is a, c, g, or t
  misc_feature (102)..(102): n is a, c, g, or t
  misc_feature (108)..(108): n is a, c, g, or t
  misc_feature (111)..(111): n is a, c, g, or t
  misc_feature (114)..(114): n is a, c, g, or t
  misc_feature (120)..(120): n is a, c, g, or t
  misc_feature (126)..(126): n is a, c, g, or t
  misc_feature (129)..(129): n is a, c, g, or t
  misc_feature (132)..(132): n is a, c, g, or t
  misc_feature (135)..(135): n is a, c, g, or t
  misc_feature (138)..(138): n is a, c, g, or t
  misc_feature (141)..(141): n is a, c, g, or t
  misc_feature (144)..(144): n is a, c, g, or t
  misc_feature (147)..(147): n is a, c, g, or t
  misc_feature (153)..(153): n is a, c, g, or t
  misc_feature (156)..(156): n is a, c, g, or t
  misc_feature (159)..(159): n is a, c, g, or t
  misc_feature (162)..(162): n is a, c, g, or t
  misc_feature (165)..(165): n is a, c, g, or t
  misc_feature (171)..(171): n is a, c, g, or t
  misc_feature (174)..(174): n is a, c, g, or t
  misc_feature (177)..(177): n is a, c, g, or t
  misc_feature (183)..(183): n is a, c, g, or t
  misc_feature (192)..(192): n is a, c, g, or t
  misc_feature (201)..(201): n is a, c, g, or t
  misc_feature (204)..(204): n is a, c, g, or t
  misc_feature (207)..(207): n is a, c, g, or t
ggnccnccnggnccnccnggngaraarggngaymgnggnccnacnggngarwsnggnccnmgnggnttyccnggnccnathggnccnccnggnytnaarggngaymgnggngcnathggnttyccnggnwsnmgnggnytnccnggntaygcnggnmgnccnggnaaywsnggnccnaarggncaraarggngaraarggnwsnggn

SEQ ID NO: 1175 - DNA, 819 bp, Artificial Sequence
  hCol-CNA80 (macrophage receptor MARCO THD)
  misc_feature (3)..(3): n is a, c, g, or t
  misc_feature (12)..(12): n is a, c, g, or t
  misc_feature (15)..(15): n is a, c, g, or t
  misc_feature (18)..(18): n is a, c, g, or t
  misc_feature (21)..(21): n is a, c, g, or t
  misc_feature (24)..(24): n is a, c, g, or t
  misc_feature (30)..(30): n is a, c, g, or t
  misc_feature (39)..(39): n is a, c, g, or t
  misc_feature (42)..(42): n is a, c, g, or t
  misc_feature (48)..(48): n is a, c, g, or t
  misc_feature (54)..(54): n is a, c, g, or t
  misc_feature (57)..(57): n is a, c, g, or t
  misc_feature (60)..(60): n is a, c, g, or t
  misc_feature (63)..(63): n is a, c, g, or t
  misc_feature (66)..(66): n is a, c, g, or t
  misc_feature (69)..(69): n is a, c, g, or t
  misc_feature (72)..(72): n is a, c, g, or t
  misc_feature (75)..(75): n is a, c, g, or t
  misc_feature (78)..(78): n is a, c, g, or t
  misc_feature (81)..(81): n is a, c, g, or t
  misc_feature (84)..(84): n is a, c, g, or t
  misc_feature (93)..(93): n is a, c, g, or t
  misc_feature (96)..(96): n is a, c, g, or t
  misc_feature (102)..(102): n is a, c, g, or t
  misc_feature (105)..(105): n is a, c, g, or t
  misc_feature (111)..(111): n is a, c, g, or t
  misc_feature (114)..(114): n is a, c, g, or t
  misc_feature (120)..(120): n is a, c, g, or t
  misc_feature (123)..(123): n is a, c, g, or t
  misc_feature (126)..(126): n is a, c, g, or t
  misc_feature (129)..(129): n is a, c, g, or t
  misc_feature (132)..(132): n is a, c, g, or t
  misc_feature (135)..(135): n is a, c, g, or t
  misc_feature (138)..(138): n is a, c, g, or t
  misc_feature (141)..(141): n is a, c, g, or t
  misc_feature (147)..(147): n is a, c, g, or t
  misc_feature (150)..(150): n is a, c, g, or t
  misc_feature (153)..(153): n is a, c, g, or t
  misc_feature (156)..(156): n is a, c, g, or t
  misc_feature (159)..(159): n is a, c, g, or t
  misc_feature (165)..(165): n is a, c, g, or t
  misc_feature (171)..(171): n is a, c, g, or t
  misc_feature (174)..(174): n is a, c, g, or t
  misc_feature (177)..(177): n is a, c, g, or t
  misc_feature (183)..(183): n is a, c, g, or t
  misc_feature (186)..(186): n is a, c, g, or t
  misc_feature (192)..(192): n is a, c, g, or t
  misc_feature (195)..(195): n is a, c, g, or t
  misc_feature (198)..(198): n is a, c, g, or t
  misc_feature (201)..(201): n is a, c, g, or t
  misc_feature (210)..(210): n is a, c, g, or t
  misc_feature (213)..(213): n is a, c, g, or t
  misc_feature (216)..(216): n is a, c, g, or t
  misc_feature (219)..(219): n is a, c, g, or t
  misc_feature (222)..(222): n is a, c, g, or t
  misc_feature (225)..(225): n is a, c, g, or t
  misc_feature (228)..(228): n is a, c, g, or t
  misc_feature (231)..(231): n is a, c, g, or t
  misc_feature (237)..(237): n is a, c, g, or t
  misc_feature (246)..(246): n is a, c, g, or t
  misc_feature (249)..(249): n is a, c, g, or t
  misc_feature (255)..(255): n is a, c, g, or t
  misc_feature (261)..(261): n is a, c, g, or t
  misc_feature (264)..(264): n is a, c, g, or t
  misc_feature (267)..(267): n is a, c, g, or t
  misc_feature (273)..(273): n is a, c, g, or t
  misc_feature (276)..(276): n is a, c, g, or t
  misc_feature (282)..(282): n is a, c, g, or t
  misc_feature (288)..(288): n is a, c, g, or t
  misc_feature (291)..(291): n is a, c, g, or t
  misc_feature (294)..(294): n is a, c, g, or t
  misc_feature (300)..(300): n is a, c, g, or t
  misc_feature (309)..(309): n is a, c, g, or t
  misc_feature (315)..(315): n is a, c, g, or t
  misc_feature (318)..(318): n is a, c, g, or t
  misc_feature (321)..(321): n is a, c, g, or t
  misc_feature (324)..(324): n is a, c, g, or t
  misc_feature (327)..(327): n is a, c, g, or t
  misc_feature (330)..(330): n is a, c, g, or t
  misc_feature (336)..(336): n is a, c, g, or t
  misc_feature (342)..(342): n is a, c, g, or t
  misc_feature (345)..(345): n is a, c, g, or t
  misc_feature (354)..(354): n is a, c, g, or t
  misc_feature (360)..(360): n is a, c, g, or t
  misc_feature (363)..(363): n is a, c, g, or t
  misc_feature (366)..(366): n is a, c, g, or t
  misc_feature (372)..(372): n is a, c, g, or t
  misc_feature (375)..(375): n is a, c, g, or t
  misc_feature (378)..(378): n is a, c, g, or t
  misc_feature (381)..(381): n is a, c, g, or t
  misc_feature (384)..(384): n is a, c, g, or t
  misc_feature (390)..(390): n is a, c, g, or t
  misc_feature (393)..(393): n is a, c, g, or t
  misc_feature (399)..(399): n is a, c, g, or t
  misc_feature (408)..(408): n is a, c, g, or t
  misc_feature (411)..(411): n is a, c, g, or t
  misc_feature (414)..(414): n is a, c, g, or t
  misc_feature (417)..(417): n is a, c, g, or t
  misc_feature (420)..(420): n is a, c, g, or t
  misc_feature (423)..(423): n is a, c, g, or t
  misc_feature (426)..(426): n is a, c, g, or t
  misc_feature (429)..(429): n is a, c, g, or t
  misc_feature (432)..(432): n is a, c, g, or t
  misc_feature (435)..(435): n is a, c, g, or t
  misc_feature (441)..(441): n is a, c, g, or t
  misc_feature (444)..(444): n is a, c, g, or t
  misc_feature (447)..(447): n is a, c, g, or t
  misc_feature (453)..(453): n is a, c, g, or t
  misc_feature (462)..(462): n is a, c, g, or t
  misc_feature (468)..(468): n is a, c, g, or t
  misc_feature (471)..(471): n is a, c, g, or t
  misc_feature (474)..(474): n is a, c, g, or t
  misc_feature (480)..(480): n is a, c, g, or t
  misc_feature (483)..(483): n is a, c, g, or t
  misc_feature (486)..(486): n is a, c, g, or t
  misc_feature (489)..(489): n is a, c, g, or t
  misc_feature (492)..(492): n is a, c, g, or t
  misc_feature (495)..(495): n is a, c, g, or t
  misc_feature (498)..(498): n is a, c, g, or t
  misc_feature (501)..(501): n is a, c, g, or t
  misc_feature (504)..(504): n is a, c, g, or t
  misc_feature (507)..(507): n is a, c, g, or t
  misc_feature (513)..(513): n is a, c, g, or t
  misc_feature (516)..(516): n is a, c, g, or t
  misc_feature (519)..(519): n is a, c, g, or t
  misc_feature (525)..(525): n is a, c, g, or t
  misc_feature (531)..(531): n is a, c, g, or t
  misc_feature (534)..(534): n is a, c, g, or t
  misc_feature (537)..(537): n is a, c, g, or t
  misc_feature (540)..(540): n is a, c, g, or t
  misc_feature (543)..(543): n is a, c, g, or t
  misc_feature (546)..(546): n is a, c, g, or t
  misc_feature (549)..(549): n is a, c, g, or t
  misc_feature (552)..(552): n is a, c, g, or t
  misc_feature (555)..(555): n is a, c, g, or t
  misc_feature (558)..(558): n is a, c, g, or t
  misc_feature (561)..(561): n is a, c, g, or t
  misc_feature (564)..(564): n is a, c, g, or t
  misc_feature (567)..(567): n is a, c, g, or t
  misc_feature (570)..(570): n is a, c, g, or t
  misc_feature (573)..(573): n is a, c, g, or t
  misc_feature (576)..(576): n is a, c, g, or t
  misc_feature (579)..(579): n is a, c, g, or t
  misc_feature (582)..(582): n is a, c, g, or t
  misc_feature (585)..(585): n is a, c, g, or t
  misc_feature (588)..(588): n is a, c, g, or t
  misc_feature (591)..(591): n is a, c, g, or t
  misc_feature (594)..(594): n is a, c, g, or t
  misc_feature (597)..(597): n is a, c, g, or t
  misc_feature (600)..(600): n is a, c, g, or t
  misc_feature (606)..(606): n is a, c, g, or t
  misc_feature (609)..(609): n is a, c, g, or t
  misc_feature (615)..(615): n is a, c, g, or t
  misc_feature (621)..(621): n is a, c, g, or t
  misc_feature (624)..(624): n is a, c, g, or t
  misc_feature (627)..(627): n is a, c, g, or t
  misc_feature (633)..(633): n is a, c, g, or t
  misc_feature (642)..(642): n is a, c, g, or t
  misc_feature (645)..(645): n is a, c, g, or t
  misc_feature (651)..(651): n is a, c, g, or t
  misc_feature (657)..(657): n is a, c, g, or t
  misc_feature (660)..(660): n is a, c, g, or t
  misc_feature (663)..(663): n is a, c, g, or t
  misc_feature (666)..(666): n is a, c, g, or t
  misc_feature (669)..(669): n is a, c, g, or t
  misc_feature (672)..(672): n is a, c, g, or t
  misc_feature (675)..(675): n is a, c, g, or t
  misc_feature (678)..(678): n is a, c, g, or t
  misc_feature (681)..(681): n is a, c, g, or t
  misc_feature (687)..(687): n is a, c, g, or t
  misc_feature (696)..(696): n is a, c, g, or t
  misc_feature (699)..(699): n is a, c, g, or t
  misc_feature (702)..(702): n is a, c, g, or t
  misc_feature (705)..(705): n is a, c, g, or t
  misc_feature (708)..(708): n is a, c, g, or t
  misc_feature (711)..(711): n is a, c, g, or t
  misc_feature (714)..(714): n is a, c, g, or t
  misc_feature (717)..(717): n is a, c, g, or t
  misc_feature (723)..(723): n is a, c, g, or t
  misc_feature (726)..(726): n is a, c, g, or t
  misc_feature (729)..(729): n is a, c, g, or t
  misc_feature (732)..(732): n is a, c, g, or t
  misc_feature (738)..(738): n is a, c, g, or t
  misc_feature (741)..(741): n is a, c, g, or t
  misc_feature (750)..(750): n is a, c, g, or t
  misc_feature (759)..(759): n is a, c, g, or t
  misc_feature (762)..(762): n is a, c, g, or t
  misc_feature (768)..(768): n is a, c, g, or t
  misc_feature (771)..(771): n is a, c, g, or t
  misc_feature (774)..(774): n is a, c, g, or t
  misc_feature (777)..(777): n is a, c, g, or t
  misc_feature (786)..(786): n is a, c, g, or t
  misc_feature (789)..(789): n is a, c, g, or t
  misc_feature (795)..(795): n is a, c, g, or t
  misc_feature (804)..(804): n is a, c, g, or t
  misc_feature (810)..(810): n is a, c, g, or t
  misc_feature (813)..(813): n is a, c, g, or t
ggngarcarggngcnccnggnytncarggncayaarggngcnatgggnatgccnggngcnccnggnccnccnggnccnccngcngaraarggngcnaarggngcnatgggnmgngayggngcnacnggnccnwsnggnccncarggnccnccnggngtnaarggngargcnggnytncarggnccncarggngcnccnggnaarcarggngcnacnggnacnccnggnccncarggngaraarggnwsnaarggngayggnggnytnathggnccnaarggngaracnggnacnaarggngaraarggngayytnggnytnccnggnwsnaarggngaymgnggnatgaarggngaygcnggngtnatgggnccnccnggngcncarggnwsnaarggngayttyggnmgnccnggnccnccnggnytngcnggnttyccnggngcnaarggngaycarggncarccnggnytncarggngtnccnggnccnccnggngcngtnggncayccnggngcnaarggngarccnggnwsngcnggnwsnccnggnmgngcnggnytnccnggnwsnccnggnwsnccnggngcnacnggnytnaarggnwsnaarggngayacnggnytncarggncarcarggnmgnaarggngarwsnggngtnccnggnccngcnggngtnaarggngarcarggnwsnccnggnytngcnggnccnaarggngcnccnggncargcnggncaraarggngaycarggngtnaarggnwsnwsnggngarcarggngtnaarggngaraarggngarmgnggngaraay

SEQ ID NO: 1176 - DNA, 441 bp, Artificial Sequence
  hCol-CNA81 (scavenger receptor A3 THD)
  misc_feature (3)..(3): n is a, c, g, or t
  misc_feature (6)..(6): n is a, c, g, or t
  misc_feature (9)..(9): n is a, c, g, or t
  misc_feature (12)..(12): n is a, c, g, or t
  misc_feature (15)..(15): n is a, c, g, or t
  misc_feature (18)..(18): n is a, c, g, or t
  misc_feature (21)..(21): n is a, c, g, or t
  misc_feature (24)..(24): n is a, c, g, or t
  misc_feature (27)..(27): n is a, c, g, or t
  misc_feature (30)..(30): n is a, c, g, or t
  misc_feature (39)..(39): n is a, c, g, or t
  misc_feature (48)..(48): n is a, c, g, or t
  misc_feature (51)..(51): n is a, c, g, or t
  misc_feature (57)..(57): n is a, c, g, or t
  misc_feature (60)..(60): n is a, c, g, or t
  misc_feature (63)..(63): n is a, c, g, or t
  misc_feature (66)..(66): n is a, c, g, or t
  misc_feature (69)..(69): n is a, c, g, or t
  misc_feature (72)..(72): n is a, c, g, or t
  misc_feature (75)..(75): n is a, c, g, or t
  misc_feature (78)..(78): n is a, c, g, or t
  misc_feature (84)..(84): n is a, c, g, or t
  misc_feature (90)..(90): n is a, c, g, or t
  misc_feature (93)..(93): n is a, c, g, or t
  misc_feature (96)..(96): n is a, c, g, or t
  misc_feature (99)..(99): n is a, c, g, or t
  misc_feature (102)..(102): n is a, c, g, or t
  misc_feature (105)..(105): n is a, c, g, or t
  misc_feature (108)..(108): n is a, c, g, or t
  misc_feature (111)..(111): n is a, c, g, or t
  misc_feature (114)..(114): n is a, c, g, or t
  misc_feature (120)..(120): n is a, c, g, or t
  misc_feature (123)..(123): n is a, c, g, or t
  misc_feature (129)..(129): n is a, c, g, or t
  misc_feature (135)..(135): n is a, c, g, or t
  misc_feature (138)..(138): n is a, c, g, or t
  misc_feature (144)..(144): n is a, c, g, or t
  misc_feature (147)..(147): n is a, c, g, or t
  misc_feature (150)..(150): n is a, c, g, or t
  misc_feature (153)..(153): n is a, c, g, or t
  misc_feature (156)..(156): n is a, c, g, or t
  misc_feature (162)..(162): n is a, c, g, or t
  misc_feature (165)..(165): n is a, c, g, or t
  misc_feature (168)..(168): n is a, c, g, or t
  misc_feature (171)..(171): n is a, c, g, or t
  misc_feature (174)..(174): n is a, c, g, or t
  misc_feature (177)..(177): n is a, c, g, or t
  misc_feature (180)..(180): n is a, c, g, or t
  misc_feature (183)..(183): n is a, c, g, or t
  misc_feature (189)..(189): n is a, c, g, or t
  misc_feature (192)..(192): n is a, c, g, or t
  misc_feature (195)..(195): n is a, c, g, or t
  misc_feature (201)..(201): n is a, c, g, or t
  misc_feature (204)..(204): n is a, c, g, or t
  misc_feature (210)..(210): n is a, c, g, or t
  misc_feature (213)..(213): n is a, c, g, or t
  misc_feature (219)..(219): n is a, c, g, or t
  misc_feature (222)..(222): n is a, c, g, or t
  misc_feature (225)..(225): n is a, c, g, or t
  misc_feature (228)..(228): n is a, c, g, or t
  misc_feature (231)..(231): n is a, c, g, or t
  misc_feature (234)..(234): n is a, c, g, or t
  misc_feature (237)..(237): n is a, c, g, or t
  misc_feature (243)..(243): n is a, c, g, or t
  misc_feature (246)..(246): n is a, c, g, or t
  misc_feature (249)..(249): n is a, c, g, or t
  misc_feature (255)..(255): n is a, c, g, or t
  misc_feature (264)..(264): n is a, c, g, or t
  misc_feature (267)..(267): n is a, c, g, or t
  misc_feature (270)..(270): n is a, c, g, or t
  misc_feature (273)..(273): n is a, c, g, or t
  misc_feature (276)..(276): n is a, c, g, or t
  misc_feature (282)..(282): n is a, c, g, or t
  misc_feature (285)..(285): n is a, c, g, or t
  misc_feature (288)..(288): n is a, c, g, or t
  misc_feature (291)..(291): n is a, c, g, or t
  misc_feature (294)..(294): n is a, c, g, or t
  misc_feature (297)..(297): n is a, c, g, or t
  misc_feature (300)..(300): n is a, c, g, or t
  misc_feature (303)..(303): n is a, c, g, or t
  misc_feature (306)..(306): n is a, c, g, or t
  misc_feature (309)..(309): n is a, c, g, or t
  misc_feature (312)..(312): n is a, c, g, or t
  misc_feature (318)..(318): n is a, c, g, or t
  misc_feature (324)..(324): n is a, c, g, or t
  misc_feature (327)..(327): n is a, c, g, or t
  misc_feature (333)..(333): n is a, c, g, or t
  misc_feature (336)..(336): n is a, c, g, or t
  misc_feature (342)..(342): n is a, c, g, or t
  misc_feature (345)..(345): n is a, c, g, or t
  misc_feature (348)..(348): n is a, c, g, or t
  misc_feature (351)..(351): n is a, c, g, or t
  misc_feature (354)..(354): n is a, c, g, or t
  misc_feature (360)..(360): n is a, c, g, or t
  misc_feature (363)..(363): n is a, c, g, or t
  misc_feature (366)..(366): n is a, c, g, or t
  misc_feature (372)..(372): n is a, c, g, or t
  misc_feature (375)..(375): n is a, c, g, or t
  misc_feature (381)..(381): n is a, c, g, or t
  misc_feature (387)..(387): n is a, c, g, or t
  misc_feature (390)..(390): n is a, c, g, or t
  misc_feature (399)..(399): n is a, c, g, or t
  misc_feature (402)..(402): n is a, c, g, or t
  misc_feature (405)..(405): n is a, c, g, or t
  misc_feature (408)..(408): n is a, c, g, or t
  misc_feature (411)..(411): n is a, c, g, or t
  misc_feature (414)..(414): n is a, c, g, or t
  misc_feature (417)..(417): n is a, c, g, or t
  misc_feature (420)..(420): n is a, c, g, or t
  misc_feature (423)..(423): n is a, c, g, or t
  misc_feature (426)..(426): n is a, c, g, or t
  misc_feature (429)..(429): n is a, c, g, or t
  misc_feature (432)..(432): n is a, c, g, or t
  misc_feature (435)..(435): n is a, c, g, or t
  misc_feature (438)..(438): n is a, c, g, or t
ggngcnccnggnccnccnggnccnmgnggnttyaarggngayatgggngtnaarggnccngtnggnggnmgnggnccnaarggngayccnggnwsnytnggnccnytnggnccncarggnccncarggncarccnggngargcnggnccngtnggngarmgnggnccngtnggnccnmgnggnttyccnggnytnaarggnwsnaarggnwsnttyggnacnggnggnccnmgnggncarccnggnccnaarggngayathggnccnccnggnccngarggnccnccnggnwsnccnggnccnwsnggnccncarggnaarccnggnathgcnggnaaracnggnwsnccnggncarmgnggngcnatgggnccnaarggngarccnggnathcarggnccnccnggnytnccnggnccnccnggnccnccnggnwsncar

SEQ ID NO: 1177 - DNA, 441 bp, Artificial Sequence
  hCol-CNA82 (collectin-12 scavenger receptor A4 THD)
  misc_feature (3)..(3): n is a, c, g, or t
  misc_feature (6)..(6): n is a, c, g, or t
  misc_feature (9)..(9): n is a, c, g, or t
  misc_feature (12)..(12): n is a, c, g, or t
  misc_feature (15)..(15): n is a, c, g, or t
  misc_feature (18)..(18): n is a, c, g, or t
  misc_feature (21)..(21): n is a, c, g, or t
  misc_feature (24)..(24): n is a, c, g, or t
  misc_feature (27)..(27): n is a, c, g, or t
  misc_feature (30)..(30): n is a, c, g, or t
  misc_feature (36)..(36): n is a, c, g, or t
  misc_feature (39)..(39): n is a, c, g, or t
  misc_feature (42)..(42): n is a, c, g, or t
  misc_feature (48)..(48): n is a, c, g, or t
  misc_feature (51)..(51): n is a, c, g, or t
  misc_feature (54)..(54): n is a, c, g, or t
  misc_feature (57)..(57): n is a, c, g, or t
  misc_feature (60)..(60): n is a, c, g, or t
  misc_feature (63)..(63): n is a, c, g, or t
  misc_feature (66)..(66): n is a, c, g, or t
  misc_feature (75)..(75): n is a, c, g, or t
  misc_feature (84)..(84): n is a, c, g, or t
  misc_feature (93)..(93): n is a, c, g, or t
  misc_feature (99)..(99): n is a, c, g, or t
  misc_feature (102)..(102): n is a, c, g, or t
  misc_feature (105)..(105): n is a, c, g, or t
  misc_feature (108)..(108): n is a, c, g, or t
  misc_feature (111)..(111): n is a, c, g, or t
  misc_feature (114)..(114): n is a, c, g, or t
  misc_feature (117)..(117): n is a, c, g, or t
  misc_feature (120)..(120): n is a, c, g, or t
  misc_feature (126)..(126): n is a, c, g, or t
  misc_feature (129)..(129): n is a, c, g, or t
  misc_feature (132)..(132): n is a, c, g, or t
  misc_feature (138)..(138): n is a, c, g, or t
  misc_feature (141)..(141): n is a, c, g, or t
  misc_feature (144)..(144): n is a, c, g, or t
  misc_feature (147)..(147): n is a, c, g, or t
  misc_feature (150)..(150): n is a, c, g, or t
  misc_feature (153)..(153): n is a, c, g, or t
  misc_feature (156)..(156): n is a, c, g, or t
  misc_feature (162)..(162): n is a, c, g, or t
  misc_feature (165)..(165): n is a, c, g, or t
  misc_feature (168)..(168): n is a, c, g, or t
  misc_feature (174)..(174): n is a, c, g, or t
  misc_feature (177)..(177): n is a, c, g, or t
  misc_feature (183)..(183): n is a, c, g, or t
  misc_feature (186)..(186): n is a, c, g, or t
  misc_feature (192)..(192): n is a, c, g, or t
  misc_feature (195)..(195): n is a, c, g, or t
  misc_feature (201)..(201): n is a, c, g, or t
  misc_feature (204)..(204): n is a, c, g, or t
  misc_feature (207)..(207): n is a, c, g, or t
  misc_feature (210)..(210): n is a, c, g, or t
  misc_feature (213)..(213): n is a, c, g, or t
  misc_feature (216)..(216): n is a, c, g, or t
  misc_feature (219)..(219): n is a, c, g, or t
  misc_feature (225)..(225): n is a, c, g, or t
  misc_feature (228)..(228): n is a, c, g, or t
  misc_feature (231)..(231): n is a, c, g, or t
  misc_feature (237)..(237): n is a, c, g, or t
  misc_feature (240)..(240): n is a, c, g, or t
  misc_feature (243)..(243): n is a, c, g, or t
  misc_feature (246)..(246): n is a, c, g, or t
  misc_feature (252)..(252): n is a, c, g, or t
  misc_feature (255)..(255): n is a, c, g, or t
  misc_feature (258)..(258): n is a, c, g, or t
  misc_feature (261)..(261): n is a, c, g, or t
  misc_feature (264)..(264): n is a, c, g, or t
  misc_feature (267)..(267): n is a, c, g, or t
  misc_feature (270)..(270): n is a, c, g, or t
  misc_feature (273)..(273): n is a, c, g, or t
  misc_feature (282)..(282): n is a, c, g, or t
  misc_feature (285)..(285): n is a, c, g, or t
  misc_feature (288)..(288): n is a, c, g, or t
  misc_feature (291)..(291): n is a, c, g, or t
  misc_feature (294)..(294): n is a, c, g, or t
  misc_feature (300)..(300): n is a, c, g, or t
  misc_feature (303)..(303): n is a, c, g, or t
  misc_feature (306)..(306): n is a, c, g, or t
  misc_feature (309)..(309): n is a, c, g, or t
  misc_feature (318)..(318): n is a, c, g, or t
  misc_feature (321)..(321): n is a, c, g, or t
  misc_feature (327)..(327): n is a, c, g, or t
  misc_feature (330)..(330): n is a, c, g, or t
  misc_feature (333)..(333): n is a, c, g, or t
  misc_feature (336)..(336): n is a, c, g, or t
  misc_feature (342)..(342): n is a, c, g, or t
  misc_feature (345)..(345): n is a, c, g, or t
  misc_feature (348)..(348): n is a, c, g, or t
  misc_feature (351)..(351): n is a, c, g, or t
  misc_feature (354)..(354): n is a, c, g, or t
  misc_feature (357)..(357): n is a, c, g, or t
  misc_feature (360)..(360): n is a, c, g, or t
  misc_feature (363)..(363): n is a, c, g, or t
  misc_feature (366)..(366): n is a, c, g, or t
  misc_feature (369)..(369): n is a, c, g, or t
  misc_feature (372)..(372): n is a, c, g, or t
  misc_feature (375)..(375): n is a, c, g, or t
  misc_feature (378)..(378): n is a, c, g, or t
  misc_feature (381)..(381): n is a, c, g, or t
  misc_feature (384)..(384): n is a, c, g, or t
  misc_feature (387)..(387): n is a, c, g, or t
  misc_feature (390)..(390): n is a, c, g, or t
  misc_feature (396)..(396): n is a, c, g, or t
  misc_feature (399)..(399): n is a, c, g, or t
  misc_feature (402)..(402): n is a, c, g, or t
  misc_feature (408)..(408): n is a, c, g, or t
  misc_feature (411)..(411): n is a, c, g, or t
  misc_feature (414)..(414): n is a, c, g, or t
  misc_feature (417)..(417): n is a, c, g, or t
  misc_feature (420)..(420): n is a, c, g, or t
  misc_feature (423)..(423): n is a, c, g, or t
  misc_feature (426)..(426): n is a, c, g, or t
  misc_feature (429)..(429): n is a, c, g, or t
  misc_feature (432)..(432): n is a, c, g, or t
  misc_feature (435)..(435): n is a, c, g, or t
  misc_feature (438)..(438): n is a, c, g, or t
  misc_feature (441)..(441): n is a, c, g, or t
ggnccnccnggnccnmgnggnccnmgnggngaymgnggnwsncarggnccnccnggnccnacnggnaayaarggncaraarggngaraarggngarccnggnccnccnggnccngcnggngarmgnggnccnathggnccngcnggnccnccnggngarmgnggnggnaarggnwsnaarggnwsncarggnccnaarggnwsnmgnggnwsnccnggnaarccnggnccncarggnwsnwsnggngayccnggnccnccnggnccnccnggnaargarggnytnccnggnccncarggnccnccnggnttycarggnytncarggnacngtnggngarccnggngtnccnggnccnmgnggnytnccnggnytnccnggngtnccnggnatgccnggnccnaarggnccnccnggnccnccnggnccnwsnggngcngtn

SEQ ID NO: 1178 - DNA, 225 bp, Artificial Sequence
  hCol-CNA83 (scavenger receptor A5 THD)
  misc_feature (3)..(3): n is a, c, g, or t
  misc_feature (6)..(6): n is a, c, g, or t
  misc_feature (9)..(9): n is a, c, g, or t
  misc_feature (12)..(12): n is a, c, g, or t
  misc_feature (15)..(15): n is a, c, g, or t
  misc_feature (21)..(21): n is a, c, g, or t
  misc_feature (30)..(30): n is a, c, g, or t
  misc_feature (39)..(39): n is a, c, g, or t
  misc_feature (48)..(48): n is a, c, g, or t
  misc_feature (51)..(51): n is a, c, g, or t
  misc_feature (54)..(54): n is a, c, g, or t
  misc_feature (57)..(57): n is a, c, g, or t
  misc_feature (63)..(63): n is a, c, g, or t
  misc_feature (66)..(66): n is a, c, g, or t
  misc_feature (69)..(69): n is a, c, g, or t
  misc_feature (72)..(72): n is a, c, g, or t
  misc_feature (75)..(75): n is a, c, g, or t
  misc_feature (78)..(78): n is a, c, g, or t
  misc_feature (81)..(81): n is a, c, g, or t
  misc_feature (84)..(84): n is a, c, g, or t
  misc_feature (87)..(87): n is a, c, g, or t
  misc_feature (90)..(90): n is a, c, g, or t
  misc_feature (93)..(93): n is a, c, g, or t
  misc_feature (99)..(99): n is a, c, g, or t
  misc_feature (102)..(102): n is a, c, g, or t
  misc_feature (105)..(105): n is a, c, g, or t
  misc_feature (108)..(108): n is a, c, g, or t
  misc_feature (111)..(111): n is a, c, g, or t
  misc_feature (114)..(114): n is a, c, g, or t
  misc_feature (117)..(117): n is a, c, g, or t
  misc_feature (120)..(120): n is a, c, g, or t
  misc_feature (123)..(123): n is a, c, g, or t
  misc_feature (129)..(129): n is a, c, g, or t
  misc_feature (138)..(138): n is a, c, g, or t
  misc_feature (144)..(144): n is a, c, g, or t
  misc_feature (147)..(147): n is a, c, g, or t
  misc_feature (150)..(150): n is a, c, g, or t
  misc_feature (153)..(153): n is a, c, g, or t
  misc_feature (156)..(156): n is a, c, g, or t
  misc_feature (159)..(159): n is a, c, g, or t
  misc_feature (165)..(165): n is a, c, g, or t
  misc_feature (171)..(171): n is a, c, g, or t
  misc_feature (174)..(174): n is a, c, g, or t
  misc_feature (183)..(183): n is a, c, g, or t
  misc_feature (189)..(189): n is a, c, g, or t
  misc_feature (192)..(192): n is a, c, g, or t
  misc_feature (195)..(195): n is a, c, g, or t
  misc_feature (201)..(201): n is a, c, g, or t
  misc_feature (210)..(210): n is a, c, g, or t
  misc_feature (219)..(219): n is a, c, g, or t
  misc_feature (225)..(225): n is a, c, g, or t
ggnccnccnggnccnaarggngaycarggngaygarggnaargarggnmgnccnggnathccnggnytnccnggnytnmgnggnytnccnggngarmgnggnacnccnggnytnccnggnccnaarggngaygayggnaarytnggngcnacnggnccnatgggnatgmgnggnttyaarggngaymgnggnccnaarggngaraarggngaraarggngaymgn

SEQ ID NO: 1179 - DNA, 108 bp, Artificial Sequence
  hCol-CNA84 (collagen TH containing 1 THD)
  misc_feature (3)..(3): n is a, c, g, or t
  misc_feature (6)..(6): n is a, c, g, or t
  misc_feature (9)..(9): n is a, c, g, or t
  misc_feature (12)..(12): n is a, c, g, or t
  misc_feature (15)..(15): n is a, c, g, or t
  misc_feature (18)..(18): n is a, c, g, or t
  misc_feature (21)..(21): n is a, c, g, or t
  misc_feature (24)..(24): n is a, c, g, or t
  misc_feature (30)..(30): n is a, c, g, or t
  misc_feature (33)..(33): n is a, c, g, or t
  misc_feature (36)..(36): n is a, c, g, or t
  misc_feature (39)..(39): n is a, c, g, or t
  misc_feature (42)..(42): n is a, c, g, or t
  misc_feature (48)..(48): n is a, c, g, or t
  misc_feature (54)..(54): n is a, c, g, or t
  misc_feature (57)..(57): n is a, c, g, or t
  misc_feature (60)..(60): n is a, c, g, or t
  misc_feature (63)..(63): n is a, c, g, or t
  misc_feature (66)..(66): n is a, c, g, or t
  misc_feature (72)..(72): n is a, c, g, or t
  misc_feature (75)..(75): n is a, c, g, or t
  misc_feature (78)..(78): n is a, c, g, or t
  misc_feature (84)..(84): n is a, c, g, or t
  misc_feature (93)..(93): n is a, c, g, or t
  misc_feature (102)..(102): n is a, c, g, or t
ggnccngcnggngtnccnggnmgngayggnwsnccnggngcnaayggnathccnggnacnccnggnathccnggnmgngayggnttyaarggngaraarggngartgy

SEQ ID NO: 1180 - DNA, 267 bp, Artificial Sequence
  hCol-CNA85 (collagen-CaEGF 1 THD)
  misc_feature (3)..(3): n is a, c, g, or t
  misc_feature (6)..(6): n is a, c, g, or t
  misc_feature (9)..(9): n is a, c, g, or t
  misc_feature (12)..(12): n is a, c, g, or t
  misc_feature (15)..(15): n is a, c, g, or t
  misc_feature (18)..(18): n is a, c, g, or t
  misc_feature (21)..(21): n is a, c, g, or t
  misc_feature (24)..(24): n is a, c, g, or t
  misc_feature (30)..(30): n is a, c, g, or t
  misc_feature (33)..(33): n is a, c, g, or t
  misc_feature (36)..(36): n is a, c, g, or t
  misc_feature (39)..(39): n is a, c, g, or t
  misc_feature (42)..(42): n is a, c, g, or t
  misc_feature (45)..(45): n is a, c, g, or t
  misc_feature (48)..(48): n is a, c, g, or t
  misc_feature (51)..(51): n is a, c, g, or t
  misc_feature (57)..(57): n is a, c, g, or t
  misc_feature (60)..(60): n is a, c, g, or t
  misc_feature (63)..(63): n is a, c, g, or t
  misc_feature (66)..(66): n is a, c, g, or t
  misc_feature (72)..(72): n is a, c, g, or t
  misc_feature (75)..(75): n is a, c, g, or t
  misc_feature (81)..(81): n is a, c, g, or t
  misc_feature (84)..(84): n is a, c, g, or t
  misc_feature (87)..(87): n is a, c, g, or t
  misc_feature (90)..(90): n is a, c, g, or t
  misc_feature (93)..(93): n is a, c, g, or t
  misc_feature (99)..(99): n is a, c, g, or t
  misc_feature (102)..(102): n is a, c, g, or t
  misc_feature (105)..(105): n is a, c, g, or t
  misc_feature (108)..(108): n is a, c, g, or t
  misc_feature (111)..(111): n is a, c, g, or t
  misc_feature (114)..(114): n is a, c, g, or t
  misc_feature (120)..(120): n is a, c, g, or t
  misc_feature (123)..(123): n is a, c, g, or t
  misc_feature (129)..(129): n is a, c, g, or t
  misc_feature (132)..(132): n is a, c, g, or t
  misc_feature (135)..(135): n is a, c, g, or t
  misc_feature (138)..(138): n is a, c, g, or t
  misc_feature (144)..(144): n is a, c, g, or t
  misc_feature (147)..(147): n is a, c, g, or t
  misc_feature (162)..(162): n is a, c, g, or t
  misc_feature (165)..(165): n is a, c, g, or t
  misc_feature (168)..(168): n is a, c, g, or t
  misc_feature (171)..(171): n is a, c, g, or t
  misc_feature (174)..(174): n is a, c, g, or t
  misc_feature (177)..(177): n is a, c, g, or t
  misc_feature (180)..(180): n is a, c, g, or t
  misc_feature (183)..(183): n is a, c, g, or t
  misc_feature (186)..(186): n is a, c, g, or t
  misc_feature (189)..(189): n is a, c, g, or t
  misc_feature (192)..(192): n is a, c, g, or t
  misc_feature (195)..(195): n is a, c, g, or t
  misc_feature (198)..(198): n is a, c, g, or t
  misc_feature (201)..(201): n is a, c, g, or t
  misc_feature (207)..(207): n is a, c, g, or t
  misc_feature (210)..(210): n is a, c, g, or t
  misc_feature (216)..(216): n is a, c, g, or t
  misc_feature (222)..(222): n is a, c, g, or t
  misc_feature (225)..(225): n is a, c, g, or t
  misc_feature (228)..(228): n is a, c, g, or t
  misc_feature (231)..(231): n is a, c, g, or t
  misc_feature (234)..(234): n is a, c, g, or t
  misc_feature (237)..(237): n is a, c, g, or t
  misc_feature (240)..(240): n is a, c, g, or t
  misc_feature (243)..(243): n is a, c, g, or t
  misc_feature (246)..(246): n is a, c, g, or t
  misc_feature (249)..(249): n is a, c, g, or t
  misc_feature (252)..(252): n is a, c, g, or t
  misc_feature (255)..(255): n is a, c, g, or t
  misc_feature (258)..(258): n is a, c, g, or t
  misc_feature (261)..(261): n is a, c, g, or t
  misc_feature (264)..(264): n is a, c, g, or t
ggnccnccnggnytnccnggnggncarggnccnccnggnwsnccnggnccnaarggnwsnccnggnttyccnggnatgccnggnccnccnggncarccnggnccnmgnggnwsnatgggnccnatgggnccnwsnccngayytnwsncayathaarcarggnmgnmgnggnccngtnggnccnccnggngcnccnggnmgngayggnwsnaarggngarmgnggngcnccnggnccnmgnggnwsnccnggnccnccnggnwsntty

SEQ ID NO: 1181 - DNA, 462 bp, Artificial Sequence
  hCol-CNA86 (WD repeat containing 33 THD)
  misc_feature (3)..(3): n is a, c, g, or t
  misc_feature (6)..(6): n is a, c, g, or t
  misc_feature (9)..(9): n is a, c, g, or t
  misc_feature (12)..(12): n is a, c, g, or t
  misc_feature (15)..(15): n is a, c, g, or t
  misc_feature (21)..(21): n is a, c, g, or t
  misc_feature (30)..(30): n is a, c, g, or t
  misc_feature (33)..(33): n is a, c, g, or t
  misc_feature (36)..(36): n is a, c, g, or t
  misc_feature (39)..(39): n is a, c, g, or t
  misc_feature (42)..(42): n is a, c, g, or t
  misc_feature (48)..(48): n is a, c, g, or t
  misc_feature (57)..(57): n is a, c, g, or t
  misc_feature (60)..(60): n is a, c, g, or t
  misc_feature (66)..(66): n is a, c, g, or t
  misc_feature (69)..(69): n is a, c, g, or t
  misc_feature (72)..(72): n is a, c, g, or t
  misc_feature (75)..(75): n is a, c, g, or t
  misc_feature (84)..(84): n is a, c, g, or t
  misc_feature (87)..(87): n is a, c, g, or t
  misc_feature (90)..(90): n is a, c, g, or t
  misc_feature (93)..(93): n is a, c, g, or t
  misc_feature (96)..(96): n is a, c, g, or t
  misc_feature (102)..(102): n is a, c, g, or t
  misc_feature (111)..(111): n is a, c, g, or t
  misc_feature (114)..(114): n is a, c, g, or t
  misc_feature (120)..(120): n is a, c, g, or t
  misc_feature (123)..(123): n is a, c, g, or t
  misc_feature (129)..(129): n is a, c, g, or t
  misc_feature (132)..(132): n is a, c, g, or t
  misc_feature (135)..(135): n is a, c, g, or t
  misc_feature (141)..(141): n is a, c, g, or t
  misc_feature (144)..(144): n is a, c, g, or t
  misc_feature (147)..(147): n is a, c, g, or t
  misc_feature (150)..(150): n is a, c, g, or t
  misc_feature (153)..(153): n is a, c, g, or t
  misc_feature (168)..(168): n is a, c, g, or t
  misc_feature (171)..(171): n is a, c, g, or t
  misc_feature (177)..(177): n is a, c, g, or t
  misc_feature (186)..(186): n is a, c, g, or t
  misc_feature (192)..(192): n is a, c, g, or t
  misc_feature (195)..(195): n is a, c, g, or t
  misc_feature (198)..(198): n is a, c, g, or t
  misc_feature (204)..(204): n is a, c, g, or t
  misc_feature (207)..(207): n is a, c, g, or t
  misc_feature (210)..(210): n is a, c, g, or t
  misc_feature (213)..(213): n is a, c, g, or t
  misc_feature (216)..(216): n is a, c, g, or t
  misc_feature (222)..(222): n is a, c, g, or t
  misc_feature (225)..(225): n is a, c, g, or t
  misc_feature (228)..(228): n is a, c, g, or t
  misc_feature (231)..(231): n is a, c, g, or t
  misc_feature (234)..(234): n is a, c, g, or t
  misc_feature (240)..(240): n is a, c, g, or t
  misc_feature (243)..(243): n is a, c, g, or t
  misc_feature (246)..(246): n is a, c, g, or t
  misc_feature (249)..(249): n is a, c, g, or t
  misc_feature (252)..(252): n is a, c, g, or t
  misc_feature (258)..(258): n is a, c, g, or t
  misc_feature (267)..(267): n is a, c, g, or t
  misc_feature (270)..(270): n is a, c, g, or t
  misc_feature (276)..(276): n is a, c, g, or t
  misc_feature (279)..(279): n is a, c, g, or t
  misc_feature (282)..(282): n is a, c, g, or t
  misc_feature (285)..(285): n is a, c, g, or t
  misc_feature (288)..(288): n is a, c, g, or t
  misc_feature (294)..(294): n is a, c, g, or t
  misc_feature (303)..(303): n is a, c, g, or t
  misc_feature (306)..(306): n is a, c, g, or t
  misc_feature (312)..(312): n is a, c, g, or t
  misc_feature (315)..(315): n is a, c, g, or t
  misc_feature (318)..(318): n is a, c, g, or t
  misc_feature (321)..(321): n is a, c, g, or t
  misc_feature (324)..(324): n is a, c, g, or t
  misc_feature (330)..(330): n is a, c, g, or t
  misc_feature (336)..(336): n is a, c, g, or t
  misc_feature (339)..(339): n is a, c, g, or t
  misc_feature (342)..(342): n is a, c, g, or t
  misc_feature (348)..(348): n is a, c, g, or t
  misc_feature (351)..(351): n is a, c, g, or t
  misc_feature (354)..(354): n is a, c, g, or t
  misc_feature (357)..(357): n is a, c, g, or t
  misc_feature (360)..(360): n is a, c, g, or t
  misc_feature (366)..(366): n is a, c, g, or t
  misc_feature (375)..(375): n is a, c, g, or t
  misc_feature (378)..(378): n is a, c, g, or t
  misc_feature (381)..(381): n is a, c, g, or t
  misc_feature (384)..(384): n is a, c, g, or t
  misc_feature (387)..(387): n is a, c, g, or t
  misc_feature (390)..(390): n is a, c, g, or t
  misc_feature (393)..(393): n is a, c, g, or t
  misc_feature (402)..(402): n is a, c, g, or t
  misc_feature (405)..(405): n is a, c, g, or t
  misc_feature (408)..(408): n is a, c, g, or t
  misc_feature (414)..(414): n is a, c, g, or t
  misc_feature (420)..(420): n is a, c, g, or t
  misc_feature (429)..(429): n is a, c, g, or t
  misc_feature (432)..(432): n is a, c, g, or t
  misc_feature (435)..(435): n is a, c, g, or t
  misc_feature (438)..(438): n is a, c, g, or t
  misc_feature (441)..(441): n is a, c, g, or t
  misc_feature (447)..(447): n is a, c, g, or t
  misc_feature (456)..(456): n is a, c, g, or t
  misc_feature (459)..(459): n is a, c, g, or t
  misc_feature (462)..(462): n is a, c, g, or t
ggnccnccnggnccncarggncarttymgnccnccnggnccncarggncaratgggnccncarggnccnccnytncaycarggnggnggnggnccncarggnttyatgggnccncarggnccncarggnccnccncarggnytnccnmgnccncargayatgcayggnccncarggnatgcarmgncayccnggnccncayggnccnytnggnccncarggnccnccnggnccncarggnwsnwsnggnccncarggncayatgggnccncarggnccnccnggnccncarggncayathggnccncarggnccnccnggnccncarggncayytnggnccncarggnccnccnggnacncarggnatgcarggnccnccnggnccnmgnggnatgcarggnccnccncayccncayggnathcarggnggnccnggnwsncarggnathcarggnccngtn

SEQ ID NO: 1182 - DNA, 588 bp, Artificial Sequence
  hCol-CNA87 (acetylcholinesterase THD)
  misc_feature (3)..(3): n is a, c, g, or t
  misc_feature (6)..(6): n is a, c, g, or t
  misc_feature (9)..(9): n is a, c, g, or t
  misc_feature (12)..(12): n is a, c, g, or t
  misc_feature (15)..(15): n is a, c, g, or t
  misc_feature (18)..(18): n is a, c, g, or t
  misc_feature (21)..(21): n is a, c, g, or t
  misc_feature (24)..(24): n is a, c, g, or t
  misc_feature (27)..(27): n is a, c, g, or t
  misc_feature (30)..(30): n is a, c, g, or t
  misc_feature (33)..(33): n is a, c, g, or t
  misc_feature (39)..(39): n is a, c, g, or t
  misc_feature (42)..(42): n is a, c, g, or t
  misc_feature (45)..(45): n is a, c, g, or t
  misc_feature (48)..(48): n is a, c, g, or t
  misc_feature (51)..(51): n is a, c, g, or t
  misc_feature (54)..(54): n is a, c, g, or t
  misc_feature (57)..(57): n is a, c, g, or t
  misc_feature (63)..(63): n is a, c, g, or t
  misc_feature (66)..(66): n is a, c, g, or t
  misc_feature (69)..(69): n is a, c, g, or t
  misc_feature (75)..(75): n is a, c, g, or t
  misc_feature (84)..(84): n is a, c, g, or t
  misc_feature (90)..(90): n is a, c, g, or t
  misc_feature (93)..(93): n is a, c, g, or t
  misc_feature (96)..(96): n is a, c, g, or t
  misc_feature (99)..(99): n is a, c, g, or t
  misc_feature (102)..(102): n is a, c, g, or t
  misc_feature (105)..(105): n is a, c, g, or t
  misc_feature (111)..(111): n is a, c, g, or t
  misc_feature (114)..(114): n is a, c, g, or t
  misc_feature (117)..(117): n is a, c, g, or t
  misc_feature (120)..(120): n is a, c, g, or t
  misc_feature (123)..(123): n is a, c, g, or t
  misc_feature (126)..(126): n is a, c, g, or t
  misc_feature (129)..(129): n is a, c, g, or t
  misc_feature (132)..(132): n is a, c, g, or t
  misc_feature (135)..(135): n is a, c, g, or t
  misc_feature (138)..(138): n is a, c, g, or t
  misc_feature (144)..(144): n is a, c, g, or t
  misc_feature (147)..(147): n is a, c, g, or t
  misc_feature (150)..(150): n is a, c, g, or t
  misc_feature (156)..(156): n is a, c, g, or t
  misc_feature (162)..(162): n is a, c, g, or t
  misc_feature (165)..(165): n is a, c, g, or t
  misc_feature (168)..(168): n is a, c, g, or t
  misc_feature (174)..(174): n is a, c, g, or t
  misc_feature (177)..(177): n is a, c, g, or t
  misc_feature (180)..(180): n is a, c, g, or t
  misc_feature (183)..(183): n is a, c, g, or t
  misc_feature (192)..(192): n is a, c, g, or t
  misc_feature (198)..(198): n is a, c, g, or t
  misc_feature (201)..(201): n is a, c, g, or t
  misc_feature (210)..(210): n is a, c, g, or t
  misc_feature (213)..(213): n is a, c, g, or t
  misc_feature (216)..(216): n is a, c, g, or t
  misc_feature (219)..(219): n is a, c, g, or t
  misc_feature (222)..(222): n is a, c, g, or t
  misc_feature (225)..(225): n is a, c, g, or t
  misc_feature (228)..(228): n is a, c, g, or t
  misc_feature (231)..(231): n is a, c, g, or t
  misc_feature (237)..(237): n is a, c, g, or t
  misc_feature (240)..(240): n is a, c, g, or t
  misc_feature (246)..(246): n is a, c, g, or t
  misc_feature (252)..(252): n is a, c, g, or t
  misc_feature (255)..(255): n is a, c, g, or t
  misc_feature (258)..(258): n is a, c, g, or t
  misc_feature (261)..(261): n is a, c, g, or t
  misc_feature (264)..(264): n is a, c, g, or t
  misc_feature (273)..(273): n is a, c, g, or t
  misc_feature (276)..(276): n is a, c, g, or t
  misc_feature (279)..(279): n is a, c, g, or t
  misc_feature (282)..(282): n is a, c, g, or t
  misc_feature (291)..(291): n is a, c, g, or t
  misc_feature (297)..(297): n is a, c, g, or t
  misc_feature (300)..(300): n is a, c, g, or t
  misc_feature (303)..(303): n is a, c, g, or t
  misc_feature (309)..(309): n is a, c, g, or t
  misc_feature (318)..(318): n is a, c, g, or t
  misc_feature (324)..(324): n is a, c, g, or t
  misc_feature (327)..(327): n is a, c, g, or t
  misc_feature (333)..(333): n is a, c, g, or t
  misc_feature (336)..(336): n is a, c, g, or t
  misc_feature (342)..(342): n is a, c, g, or t
  misc_feature (345)..(345): n is a, c, g, or t
  misc_feature (354)..(354): n is a, c, g, or t
  misc_feature (363)..(363): n is a, c, g, or t
  misc_feature (366)..(366): n is a, c, g, or t
  misc_feature (372)..(372): n is a, c, g, or t
  misc_feature (378)..(378): n is a, c, g, or t
  misc_feature (381)..(381): n is a, c, g, or t
  misc_feature (387)..(387): n is a, c, g, or t
  misc_feature (390)..(390): n is a, c, g, or t
  misc_feature (396)..(396): n is a, c, g, or t
  misc_feature (399)..(399): n is a, c, g, or t
  misc_feature (402)..(402): n is a, c, g, or t
  misc_feature (405)..(405): n is a, c, g, or t
  misc_feature (408)..(408): n is a, c, g, or t
  misc_feature (411)..(411): n is a, c, g, or t
  misc_feature (414)..(414): n is a, c, g, or t
  misc_feature (417)..(417): n is a, c, g, or t
  misc_feature (423)..(423): n is a, c, g, or t
  misc_feature (426)..(426): n is a, c, g, or t
  misc_feature (435)..(435): n is a, c, g, or t
  misc_feature (444)..(444): n is a, c, g, or t
  misc_feature (450)..(450): n is a, c, g, or t
  misc_feature (453)..(453): n is a, c, g, or t
  misc_feature (456)..(456): n is a, c, g, or t
  misc_feature (462)..(462): n is a, c, g, or t
  misc_feature (465)..(465): n is a, c, g, or t
  misc_feature (468)..(468): n is a, c, g, or t
  misc_feature (471)..(471): n is a, c, g, or t
  misc_feature (477)..(477): n is a, c, g, or t
  misc_feature (480)..(480): n is a, c, g, or t
  misc_feature (483)..(483): n is a, c, g, or t
  misc_feature (486)..(486): n is a, c, g, or t
  misc_feature (489)..(489): n is a, c, g, or t
  misc_feature (495)..(495): n is a, c, g, or t
  misc_feature (498)..(498): n is a, c, g, or t
  misc_feature (501)..(501): n is a, c, g, or t
  misc_feature (504)..(504): n is a, c, g, or t
  misc_feature (507)..(507): n is a, c, g, or t
  misc_feature (510)..(510): n is a, c, g, or t
  misc_feature (513)..(513): n is a, c, g, or t
  misc_feature (516)..(516): n is a, c, g, or t
  misc_feature (519)..(519): n is a, c, g, or t
  misc_feature (522)..(522): n is a, c, g, or t
  misc_feature (525)..(525): n is a, c, g, or t
  misc_feature (528)..(528): n is a, c, g, or t
  misc_feature (531)..(531): n is a, c, g, or t
  misc_feature (537)..(537): n is a, c, g, or t
  misc_feature (546)..(546): n is a, c, g, or t
  misc_feature (549)..(549): n is a, c, g, or t
  misc_feature (555)..(555): n is a, c, g, or t
  misc_feature (561)..(561): n is a, c, g, or t
  misc_feature (564)..(564): n is a, c, g, or t
  misc_feature (570)..(570): n is a, c, g, or t
  misc_feature (573)..(573): n is a, c, g, or t
  misc_feature (576)..(576): n is a, c, g, or t
  misc_feature (579)..(579): n is a, c, g, or t
  misc_feature (582)..(582): n is a, c, g, or t
  misc_feature (585)..(585): n is a, c, g, or t
ggnwsnytnggnwsnccnggnccnccnggnccncarggnccnccnggnytnccnggnaaracnggnccnaarggngaraarggngarytnggnmgnccnggnmgnaarggnmgnccnggnccnccnggngtnccnggnatgccnggnccnathggntggccnggnccngarggnccnmgnggngaraarggngayytnggnatgatgggnytnccnggnwsnmgnggnccnatgggnwsnaarggntayccnggnwsnmgnggngaraarggnwsnmgnggngaraarggngayytnggnccnaarggngaraarggnttyccnggnttyccnggnatgytnggncaraarggngaratgggnccnaarggngarccnggnathgcnggncaymgnggnccnacnggnmgnccnggnaarmgnggnaarcarggncaraarggngaywsnggngtnatgggnccnccnggnaarccnggnccnwsnggncarccnggnmgnccnggnccnccnggnccnccnccngcnggncarytnathatgggnccnaarggngarmgnggnttyccnggnccnccnggnmgntgy

SEQ ID NO: 1183 - DNA, 177 bp, Artificial Sequence
  hCol-CNA88 (ectodysplasin-A THD)
  misc_feature (3)..(3): n is a, c, g, or t
  misc_feature (6)..(6): n is a, c, g, or t
  misc_feature (9)..(9): n is a, c, g, or t
  misc_feature (12)..(12): n is a, c, g, or t
  misc_feature (15)..(15): n is a, c, g, or t
  misc_feature (21)..(21): n is a, c, g, or t
  misc_feature (24)..(24): n is a, c, g, or t
  misc_feature (27)..(27): n is a, c, g, or t
  misc_feature (30)..(30): n is a, c, g, or t
  misc_feature (33)..(33): n is a, c, g, or t
  misc_feature (36)..(36): n is a, c, g, or t
  misc_feature (39)..(39): n is a, c, g, or t
  misc_feature (42)..(42): n is a, c, g, or t
  misc_feature (45)..(45): n is a, c, g, or t
  misc_feature (48)..(48): n is a, c, g, or t
  misc_feature (51)..(51): n is a, c, g, or t
  misc_feature (57)..(57): n is a, c, g, or t
  misc_feature (60)..(60): n is a, c, g, or t
  misc_feature (63)..(63): n is a, c, g, or t
  misc_feature (66)..(66): n is a, c, g, or t
  misc_feature (72)..(72): n is a, c, g, or t
  misc_feature (75)..(75): n is a, c, g, or t
  misc_feature (81)..(81): n is a, c, g, or t
  misc_feature (84)..(84): n is a, c, g, or t
  misc_feature (90)..(90): n is a, c, g, or t
  misc_feature (93)..(93): n is a, c, g, or t
  misc_feature (96)..(96): n is a, c, g, or t
  misc_feature (99)..(99): n is a, c, g, or t
  misc_feature (102)..(102): n is a, c, g, or t
  misc_feature (108)..(108): n is a, c, g, or t
  misc_feature (111)..(111): n is a, c, g, or t
  misc_feature (114)..(114): n is a, c, g, or t
  misc_feature (117)..(117): n is a, c, g, or t
  misc_feature (120)..(120): n is a, c, g, or t
  misc_feature (123)..(123): n is a, c, g, or t
  misc_feature (126)..(126): n is a, c, g, or t
  misc_feature (129)..(129): n is a, c, g, or t
  misc_feature (132)..(132): n is a, c, g, or t
  misc_feature (135)..(135): n is a, c, g, or t
  misc_feature (138)..(138): n is a, c, g, or t
  misc_feature (144)..(144): n is a, c, g, or t
  misc_feature (147)..(147): n is a, c, g, or t
  misc_feature (150)..(150): n is a, c, g, or t
  misc_feature (153)..(153): n is a, c, g, or t
  misc_feature (156)..(156): n is a, c, g, or t
  misc_feature (162)..(162): n is a, c, g, or t
  misc_feature (165)..(165): n is a, c, g, or t
  misc_feature (168)..(168): n is a, c, g, or t
  misc_feature (171)..(171): n is a, c, g, or t
  misc_feature (174)..(174): n is a, c, g, or t
  misc_feature (177)..(177): n is a, c, g, or t
ggnccnccnggnccnaayggnccnccnggnccnccnggnccnccnggnccncarggnccnccnggnathccnggnathccnggnathccnggnacnacngtnatgggnccnccnggnccnccnggnccnccnggnccncarggnccnccnggnytncarggnccnwsnggngcngcn

SEQ ID NO: 1184 - DNA, 252 bp, Artificial Sequence
  hCol-CNA89 (gliomedin THD)
  misc_feature (3)..(3): n is a, c, g, or t
  misc_feature (6)..(6): n is a, c, g, or t
  misc_feature (9)..(9): n is a, c, g, or t
  misc_feature (12)..(12): n is a, c, g, or t
  misc_feature (15)..(15): n is a, c, g, or t
  misc_feature (18)..(18): n is a, c, g, or t
  misc_feature (21)..(21): n is a, c, g, or t
  misc_feature (24)..(24): n is a, c, g, or t
  misc_feature (27)..(27): n is a, c, g, or t
  misc_feature (30)..(30): n is a, c, g, or t
  misc_feature (33)..(33): n is a, c, g, or t
  misc_feature (36)..(36): n is a, c, g, or t
  misc_feature (39)..(39): n is a, c, g, or t
  misc_feature (42)..(42): n is a, c, g, or t
  misc_feature (45)..(45): n is a, c, g, or t
  misc_feature (48)..(48): n is a, c, g, or t
  misc_feature (57)..(57): n is a, c, g, or t
  misc_feature (60)..(60): n is a, c, g, or t
  misc_feature (66)..(66): n is a, c, g, or t
  misc_feature (72)..(72): n is a, c, g, or t
  misc_feature (75)..(75): n is a, c, g, or t
  misc_feature (78)..(78): n is a, c, g, or t
  misc_feature (84)..(84): n is a, c, g, or t
  misc_feature (87)..(87): n is a, c, g, or t
  misc_feature (93)..(93): n is a, c, g, or t
  misc_feature (102)..(102): n is a, c, g, or t
  misc_feature (105)..(105): n is a, c, g, or t
  misc_feature (111)..(111): n is a, c, g, or t
  misc_feature (117)..(117): n is a, c, g, or t
  misc_feature (120)..(120): n is a, c, g, or t
  misc_feature (129)..(129): n is a, c, g, or t
  misc_feature (135)..(135): n is a, c, g, or t
  misc_feature (138)..(138): n is a, c, g, or t
  misc_feature (141)..(141): n is a, c, g, or t
  misc_feature (144)..(144): n is a, c, g, or t
  misc_feature (147)..(147): n is a, c, g, or t
  misc_feature (153)..(153): n is a, c, g, or t
  misc_feature (156)..(156): n is a, c, g, or t
  misc_feature (162)..(162): n is a, c, g, or t
  misc_feature (165)..(165): n is a, c, g, or t
  misc_feature (174)..(174): n is a, c, g, or t
  misc_feature (183)..(183): n is a, c, g, or t
  misc_feature (189)..(189): n is a, c, g, or t
  misc_feature (192)..(192): n is a, c, g, or t
  misc_feature (195)..(195): n is a, c, g, or t
  misc_feature (201)..(201): n is a, c, g, or t
  misc_feature (210)..(210): n is a, c, g, or t
  misc_feature (213)..(213): n is a, c, g, or t
  misc_feature (216)..(216): n is a, c, g, or t
  misc_feature (219)..(219): n is a, c, g, or t
  misc_feature (228)..(228): n is a, c, g, or t
  misc_feature (237)..(237): n is a, c, g, or t
  misc_feature (246)..(246): n is a, c, g, or t
  misc_feature (252)..(252): n is a, c, g, or t
ggnccnwsnggnccnccnggnccnccnggngcnggnggnytnccnggncayaayggnytngayggncarccnggnccncarggnccnaarggngaraarggngcnaayggnaarmgnggnaaratgggnathccnggngcngcnggnaayccnggngarmgnggngaraarggngaycayggngarytnggnytncarggnaaygarggnccnccnggncaraarggngaraarggngayaarggngaygtn

SEQ ID NO: 1185 - protein, 436 aa, Artificial Sequence
  RCH-1
AVKISGVLKDGTGKPVENCTIQLKARRNSATVVVNTVASENPDEAGRYSMDVEYGQYSVILLVEGFPPSHAGTITVYEDSQPGTLNDFLGAMSEDDVRPEALRRFELMVEEAARHAEEAKKNAGEAETSARNAGISASQAEESAANADTSAGDASESARQAAESAAAAKQSEEASSSSASAAAQKASESSQSAAEAELSRKTAESAAGNAARDATTATEKARESAESAQSAEQSRIAAEEAVNRIPTVVGPPGPAGPAGERGEQGAPGPSGFQGLPGPPGPPGEGGKPGDQGVPGEAGAPGLVGPRGERGFPGERGSPGAQGLQGPRGLPGTPGTDGPKGASGPAGPPGAQGPPGLQGMPQIRFRLGPASIIETNSHGWFPGTDGALITGLTFLAPKDATRVQVFFQHLQVRFGDGPWQDVKGLDEVGSDTGRTGE

SEQ ID NO: 1186 - protein, 678 aa, Artificial Sequence
  RCH-2
SVVVSGTLKSPDGEAISGANITLTALTVSPDALSGTSASAVTREGGYYGMTMDPGEYAVSVTVKGKTAVYGRVRIEGTESTVTLNMLLRRSLVEVSIPGELLTDFRQIQNNVADDLATIRRLNEDTATKNTQATQSKESAAASAKSASDSAKTATSRAAEAGQKATDATEAATRAVTAAGNAEESSTRAGESEKAAGADAEKARQHAEKARLAQESAGEILKRAEAATVSAEEARRMAENARGPPGPAGPAGERGEQGAPGPSGFQGLPGPPGPPGEGGKPGDQGVPGEAGAPGLVGPRGERGFPGERGSPGAQGLQGPRGLPGTPGTDGPKGASGPAGPPGAQGPPGLQGMPGERGAAGIAGPKGDRGDVGEKGPEGAPGKDGGRGLTGPIGPPGPAGANGEKGEVGPPGPAGSAGARGAPGERGETGPPGPAGFAGPPGADGQPGAKGEQGEAGQKGDAGAPGPQGPSGAPGPQGPTGVTGPKGARGAQGPPGATGFPGERGSPGPPGSNGNPGPPGPPGPSGKDGPKGARGDSGPPGRAGEPGLQGPAGPPGEKGEPGDDGPSGAEGPPGPQGLAGQRGIVGLPGQRGERGFPGLPGPSQIRFRLGPGNIIETNSHGWFPDTDGALITGLTFLDPKDATRVQGFFQHLQVRFGDGPWQDVKGLDEVGSDTGRTGE

SEQ ID NO: 1187 - protein, 480 aa, Artificial Sequence
  RCH-3
TVRISGVLKDGTGKPVPGCTIELKARRTTETVIVTTVAQGQPEETGSYSFDVEPGWYRVTLNTEGYAPSYVGDILVKADSEPGTLNKFLMEQDEAQYYPKALAELEAVAAEILKRAEASAASAEEAKKRAENARGVMGFPGPKGANGEPGKAGEKGLPGAPGLRGLPGKDGETGAAGPPGPAGPAGERGEQGAPGPSGFQGLPGPPGPPGEGGKPGDQGVPGEAGAPGLVGPRGERGFPGERGSPGAQGLQGPRGLPGTPGTDGPKGASGPAGPPGAQGPPGLQGMPGERGAAGIAGPKGDRGDVGEKGPEGAPGKDGGRGLTGPIGPPGPAGANGEKGEVGPPGPAGSAGARGAPGERGETGPPGPAGFAGPPGADGQPGAKGEQSTEKYAVGSFLFGSISTLESESAIKENINGEKITEVAILYRVGVTYSPTFSIVHNAGNSIPGTWRAFVSALSLGAPGYDEQTMTTNLTLFQRIV

SEQ ID NO: 1188 - DNA, 1353 bp, Artificial Sequence
  RCHDNA-1
ggatccgcggttaaaattagcggtgtgctgaaagatggcaccggtaaaccggttgaaaactgcacgatccagctgaaagcacgtcgcaattctgcgaccgtggttgtgaacacggttgcgagtgaaaatccggatgaagccggtcgttatagtatggatgtggaatatggccagtacagcgttattctgctggttgaaggttttccgccgagccatgccggtaccatcaccgtgtacgaagattctcagccgggtaccctgaacgattttctgggcgccatgtctgaagatgatgttcgtccggaagcactgcgtcgcttcgaactgatggtggaagaagcggcccgccacgcagaagaagcgaagaaaaacgccggtgaagcagaaaccagtgcgcgtaatgccggcattagcgcatctcaggcggaagaatctgcagcgaatgcggatacgagtgccggtgatgcaagtgaaagcgcacgtcaggcggcagaaagcgccgcagcagcgaaacagtctgaagaagccagctctagtagcgcaagcgccgcagcgcagaaagcgtctgaatctagtcagagtgccgcagaagcagaactgagccgtaaaaccgccgaatctgccgcgggtaatgcagcccgtgatgccaccaccgcaaccgaaaaagcgcgcgaatctgcagaaagtgcgcagagcgccgaacagtctcgtattgccgcagaagaagccgttaatcgcatcccgaccgttgttggtccgccgggtccggcaggtccggccggtgaacgcggcgaacagggtgcgccgggcccgagcggttttcagggtctgccgggtccgccgggtccgccgggtgaaggcggtaaaccgggtgatcagggtgttccgggtgaagccggtgcaccgggcctggtgggtccgcgtggcgaacgtggttttccgggtgaacgtggtagtccgggtgcccagggtctgcagggtccgcgtggtctgccgggtaccccgggtacggatggcccgaaaggtgcgagcggtccggcaggtccgccgggtgcacagggtccgccgggcctgcagggtatgccgggcccgaaaggtgatccgggcgaaacccagattcgttttcgcctgggtccggcaagtattatcgaaaccaacagccatggctggtttccgggtaccgatggtgcactgatcaccggtctgacgttcctggcgccgaaagatgccacccgtgttcaggtgtttttccagcacctgcaggtgcgcttcggcgatggtccgtggcaggatgttaaaggtctggatgaagtgggcagcgataccggtcgcacgggcgaataataagaattc

SEQ ID NO: 1189 - DNA, 2076 bp, Artificial Sequence
  RCHDNA-2
ggatccgtggttgtgagcggcaccctgaaatctccggatggtgaagccattagcggcgcaaacatcaccctgacggcactgaccgtgagtccggatgccctgagcggtaccagtgccagcgcggttacccgtgaaggcggttattacggtatgaccatggacccgggcgaatatgccgttagtgtgaccgttaaaggtaaaacggcagtgtacggccgtgttcgcatcgaaggtaccgaaagcaccgtgacgctgaatatgctgctgcgtcgctctctggtggaagttagtattccgggcgaactgctgaccgattttcgtcagatccagaacaatgttgcggatgatctggccacgattcgtcgcctgaacgaagataccgccacgaaaaatacccaggcaacgcagtctaaagaaagtgcggccgcatctgcgaaatctgccagtgatagcgcaaaaaccgccaccagtcgtgccgcagaagccggtcagaaagcaaccgatgcaaccgaagcagccacccgcgcggtgaccgcagccggtaatgcagaagaaagctctacccgcgcgggcgaatctgaaaaagcggccggtgcagatgcggaaaaagcgcgtcagcatgcggaaaaagcacgtctggcacaggaaagcgcgggtgaaattctgaaacgtgcagaagcagcgaccgtttctgcggaagaagcccgtcgcatggcagaaaatgcccgcggtccgccgggtccggcgggtccggcaggtgaacgcggcgaacagggtgcgccgggcccgagcggttttcagggtctgccgggtccgccgggtccgccgggtgaaggcggtaaaccgggtgatcagggtgtgccgggtgaagcaggtgcaccgggcctggttggtccgcgtggcgaacgtggttttccgggtgaacgtggttctccgggtgcacagggtctgcagggtccgcgtggtctgccgggtaccccgggtacggatggcccgaaaggtgcaagtggtccggccggtccgccgggtgcccagggtccgccgggcctgcagggtatgccgggtgaacgtggtgccgcaggtattgcgggtccgaaaggtgatcgcggtgatgttggtgaaaaaggtccggaaggtgccccgggtaaagatggcggtcgtggtctgaccggtccgatcggtccgccgggcccggccggtgcaaacggtgaaaaaggcgaagttggtccgccgggtccggccggtagtgcaggtgcccgtggtgccccgggcgaacgcggtgaaacgggtccgccgggcccggcgggctttgccggtccgccgggcgcggatggtcagccgggcgccaaaggtgaacagggcgaagccggtcagaaaggcgatgccggtgcaccgggtccgcagggtccgagcggtgccccgggtccgcagggcccgaccggtgtgacgggcccgaaaggtgcgcgtggcgcgcagggtccgccgggtgccaccggtttcccgggcgaacgtggtagcccgggtccgccgggttctaatggtaatcctggtccgccgggtccgccggggccgagtggcaaagatggtccgaaaggcgcgcgtggtgatagcggtccgccgggtcgcgcaggcgaaccgggtctgcagggcccggccggtccgccgggcgaaaaaggtgaaccgggtgatgatggtccgagcggtgccgaaggtccgccgggtccgcagggtctggcgggtcagcgtggtattgttggtctgccgggtcaacgtggcgaacgcggttttccgggtctgccgggtccgagcggtccgaaaggtgatccgggcgaaacccagatccgtttccgcctgggcccgggtaacattatcgaaaccaattctcatggctggtttccggatacggatggtgcactgattaccggcctgacctttctggacccgaaagatgcgacccgtgtgcagggctttttccagcacctgcaggttcgcttcggcgatggtccgtggcaggatgtgaaaggtctggatgaagttggcagcgataccggtcgcacgggcgaataataagaattc

SEQ ID NO: 1190 - DNA, 1467 bp, Artificial Sequence
  RCHDNA-3
ggatccaccgtgcgtattagcggtgttctgaaagatggtaccggtaaaccggtgccgggttgcaccattgaactgaaagcccgtcgcaccacggaaaccgtgatcgttaccacggttgcacagggtcagccggaagaaacgggcagctattcttttgatgtggaaccgggctggtaccgcgttaccctgaacacggaaggttatgcgccgagttacgtgggcgatattctggttaaagccgatagcgaaccgggcaccctgaataaattcctgatggaacaggatgaagcacagtattacccgaaagcgctggccgaactggaagccgtggccgcagaaatcctgaaacgtgccgaagcaagcgcagcgtctgcggaagaagccaaaaaacgtgcagaaaatgcccgtggtccggccggtgttatgggttttccgggtccgaaaggcgcaaatggtgaaccgggcaaagccggtgaaaaaggtctgccgggtgcaccgggtctgcgtggtctgccgggcaaagatggtgaaaccggtgcggcaggtccgccgggtccggcaggtccggcaggcgaacgcggtgaacagggcgcgccgggtccgagcggctttcagggtctgccgggtccgccgggtccgccgggcgaaggcggtaaaccgggtgatcagggtgtgccgggtgaagccggtgcaccgggtctggttggcccgcgtggtgaacgtggttttccgggtgaacgtggctctccgggtgcccagggtctgcagggtccgcgtggtctgccgggtaccccgggcacggatggtccgaaaggcgcaagtggtccggccggtccgccgggtgcacagggtccgccgggtctgcagggtatgccgggtgaacgtggcgcggcaggtattgcaggtccgaaaggtgatcgcggcgatgtgggtgaaaaaggtccggaaggtgccccgggtaaagatggcggtcgtggtctgaccggtccgattggtccgccgggcccggccggtgcgaacggcgaaaaaggtgaagtgggtccgccgggtccggcgggcagcgcaggtgcacgtggcgcaccgggtgaacgcggcgaaaccggtccgccgggtccggccggttttgcgggtccgccgggtgccgatggtcagccgggtgccaaaggcgaacagagcaccgaaaaatatgcggtgggttcttttctgttcggcagtattagcacgctggaatctgaaagtgcgatcaaagaaaacatcaacggtgaaaaaatcaccgaagttgccatcctgtatcgtgtgggcgttacctactctccgacgtttagtattgtgcataacgccggtaattctattccgggtacctggcgtgcatttgttagtgcactgagcctgggtgcaccgggctacgatgaacagaccatgaccacgaatctgacgctgttccagcgcatcgtgtaataagaattc

SEQ ID NO: 1191 - protein, 9 aa, Artificial Sequence
  Gly-X-Y triplet 1
  misc_feature (2)..(3): Xaa can be any naturally occurring amino acid
  misc_feature (5)..(6): Xaa can be any naturally occurring amino acid
  misc_feature (8)..(9): Xaa can be any naturally occurring amino acid
GXXGXXGXX

SEQ ID NO: 1192 - protein, 9 aa, Artificial Sequence
  Gly-X-Y triplet 2
  misc_feature (1)..(1): Xaa can be any naturally occurring amino acid
  misc_feature (3)..(4): Xaa can be any naturally occurring amino acid
  misc_feature (6)..(7): Xaa can be any naturally occurring amino acid
  misc_feature (9)..(9): Xaa can be any naturally occurring amino acid
XGXXGXXGX

SEQ ID NO: 1193 - protein, 9 aa, Artificial Sequence
  Gly-X-Y triplet 3
  misc_feature (1)..(2): Xaa can be any naturally occurring amino acid
  misc_feature (4)..(5): Xaa can be any naturally occurring amino acid
  misc_feature (7)..(8): Xaa can be any naturally occurring amino acid
XXGXXGXXG

1. A trimeric fusion protein comprising three polypeptide chains, wherein each polypeptide chain comprises a eukaryotic collagen or collagen-like domain and a prokaryotic or viral trimerisation domain (PVTD).

2. A fusion protein according to claim 1 having one or more of the following, independently selected, properties:
a) a melting temperature of between 34° C. and 60° C., preferably between 34° C. and 59° C., more preferably between 34° C. and 58° C., 57° C., 56° C., 55° C., 54° C., 53° C., 52° C., 51° C., 50° C., 49° C., 48° C., 47° C., 46° C., or 45° C., more preferably between 38° C. and 44° C., more preferably between 39° C. and 43° C., more preferably at least 40° C., 41° C. or 42° C.;
b) solubility of at least 25, at least 30, at least 31, at least 32, at least 33, at least 34, at least 35, at least 36, at least 37, at least 38, at least 39, or at least 40 mg/ml;
c) is comprised of one or more fusion polypeptides which are substantially resistant to proteolytic degradation by host enzymes when expressed in prokaryotic cells; and
d) exhibit improved ability to refold after denaturation into a collagen or collagen-like structure.

3. A trimeric protein according to claim 1, wherein the fusion protein forms trimers by association of the three polypeptide chains, and preferably forms a triple-helical structure.

4. A fusion protein according to claim 1 wherein two or more of the three polypeptide chains are the same as each other or different.

5. A fusion polypeptide comprising a eukaryotic collagen or collagen-like domain and a PVTD.

6. A fusion protein according to claim 1, wherein the PVTD is derived from a collagen or collagen-like protein.

7. A fusion protein according to claim 1, wherein the PVTD may be provided:
i) within a eukaryotic collagen or collagen-like domain; and/or
ii) flanking one or both ends of a eukaryotic collagen or collagen-like domain; and/or
iii) within non-eukaryotic collagen or collagen-like domain of the fusion polypeptide and/or flanking one or both ends thereof.

8. A fusion protein according to claim 1, wherein the PVTD comprises one or more functional sequences independently selected from the group consisting of stabilization sequences, binding sites, cleavage sites, and linkage sites.

9. A fusion protein according to claim 1, wherein the eukaryotic collagen or collagen-like domain is derived from vertebrate collagen or collagen-like proteins, preferably mammalian, ruminate, fish, or preferably human.

10. A fusion protein according to claim 1 wherein the eukaryotic collagen or collagen-like domain of the fusion protein or polypeptide is composed of two or more heterologous collagen or collagen-like domains operably linked to form a single collagen or collagen-like domain.

11. A fusion protein according to claim 10, wherein more than one eukaryotic collagen or collagen-like domains is present, and wherein one or more or all may be chimeric.

12. A fusion protein according to claim 1, wherein the eukaryotic collagen or collagen-like domain comprises:
i) a human fibrillar collagen chain selected from a1(I), 2(I), a1(II) and a1(III);
ii) a eukaryotic collagen or collagen-like domain comprising a sequence selected from the group consisting of sequences hCol-01 to hCol-89 of Tables K and L;
iii) a sequence consisting of a sequence selected from the groups consisting of the human collagen sequences any of hCol-01 to hCol-49 of Table K and the collagen-like domains of any of hCol-50 to hCol-89 of Table L;
iv) a domain or sequence having at least 50%, 60%, 70%, 80%, 90%, 91%, 92%, 93%, 94%, 95%, 96%, 97%, 98% or 99% sequence identity with a sequence of i), ii) or iii); or
v) fragments, variants or derivatives of a sequence of any of i) to iv).

13. A fusion protein according to claim 1, comprising one or more THDs (triple helical domains), either in tandem or separated by one or more PVTDs or other sequences.

14. A fusion protein according to claim 1, further comprising one or more functional domains, selected from the group consisting of binding sites, cleavage sites, linkage sites, and trimerisation sites.

15. A fusion protein according to claim 1 wherein a eukaryotic collagen or collagen-like domain may be independently selected from the group consisting of vertebrate, mammalian, ruminate, fish, or human collagen or collagen-like proteins.

16. A fusion protein according to claim 1, wherein the PVTD is derived from a bacterial source, preferably gram negative bacteria, preferably pathogenic E. coli, preferably E. coli strain O157:H7.

17. A fusion protein according to claim 1, wherein the PVTD may be:
i) a PVTD of any of EPcIA-001 to EPcIA-142 of Table A, any of EPcIB-001 to EPcIB-021 of Table B, any of EPcIC-001 to EPcIC-005 of Table C, or EPcID-001 of Table D, any of PfN-01 to PfN-86 of Table H, any of PCoil-01 to PCoil-46 of Table I, any of PfC-01 to PfC-61 of Table J, and a Pf2 sequence, preferably one of the Pf2 domains in sequences any of EPcIB-001 to EPcIB-021 of Table B;
ii) having an amino acid sequence having at least 50%, 60%, 70%, 80%, 90%, 91%, 92%, 93%, 94%, 95%, 96%, 97%, 98% or 99% sequence identity with a PVTD of i);
iii) encoded by a nucleic acid selected from the group consisting of sequences of Table E to G and M to R or a nucleic acid sequence having at least 50%, 60%, 70%, 80%, 90%, 91%, 92%, 93%, 94%, 95%, 96%, 97%, 98% or 99% sequence thereto; or
iv) a fragment or derivative of an afore-mentioned sequence which functions as a PVTD

18. A fusion protein according to claim 1, wherein the fusion protein comprises two or more PVTDs, the combination of PVTD's being selected from:
i) one or more sequences independently selected from the group consisting of EPcIA-001 to EPcIA-142 of Table a or a sequence having at least 50%, 60%, 70%, 80%, 90%, 91%, 92%, 93%, 94%, 95%, 96%, 97%, 98% or 99% sequence identity therewith, or a fragment or derivative thereof, in combination one or more sequences independently selected from the group consisting of EPcIB-001 to EPcIB-021 of Table B, or a sequence having at least 50%, 60%, 70%, 80%, 90%, 91%, 92%, 93%, 94%, 95%, 96%, 97%, 98% or 99% sequence identity therewith, or a fragment or derivative thereof; and optionally in combination with one or more sequences independently selected from the group consisting of EPcIC-001 to EPcIC-005 of Table C, or a sequence having at least 50%, 60%, 70%, 80%, 90%, 91%, 92%, 93%, 94%, 95%, 96%, 97%, 98% or 99% sequence identity therewith, or a fragment or derivative thereof and/or EPcID-001 of Table D, or a sequence having at least 50%, 60%, 70%, 80%, 90%, 91%, 92%, 93%, 94%, 95%, 96%, 97%, 98% or 99% sequence identity therewith, or a fragment or derivative thereof;
ii) one or more sequences independently selected from the group consisting of EPcIA-001 to EPcIA-142 of Table A or a sequence having at least 50%, 60%, 70%, 80%, 90%, 91%, 92%, 93%, 94%, 95%, 96%, 97%, 98% or 99% sequence identity therewith, or a fragment or derivative thereof, in combination one or more sequences independently selected from the group consisting of EPcIC-001 to EPcIC-005 of Table C, or a sequence having at least 50%, 60%, 70%, 80%, 90%, 91%, 92%, 93%, 94%, 95%, 96%, 97%, 98% or 99% sequence identity therewith, or a fragment or derivative thereof; and optionally in combination with one or more sequences independently selected from the group consisting of EPcIB-001 to EPcIB-021 of Table B, or a sequence having at least 50%, 60%, 70%, 80%, 90%, 91%, 92%, 93%, 94%, 95%, 96%, 97%, 98% or 99% sequence identity therewith, or a fragment or derivative thereof and/or EPcID-001 of Table D or a sequence having at least 50%, 60%, 70%, 80%, 90%, 91%, 92%, 93%, 94%, 95%, 96%, 97%, 98% or 99% sequence identity therewith, or a fragment or derivative thereof;
iii) one or more sequences independently selected from the group consisting of EPcIA-001 to EPcIA-142 of Table A or a sequence having at least 50%, 60%, 70%, 80%, 90%, 91%, 92%, 93%, 94%, 95%, 96%, 97%, 98% or 99% sequence identity therewith, or a fragment or derivative thereof, in combination and EPcID-001 of Table D, or a sequence having at least 50%, 60%, 70%, 80%, 90%, 91%, 92%, 93%, 94%, 95%, 96%, 97%, 98% or 99% sequence identity therewith, or a fragment or derivative thereof, and optionally or a sequence having at least 50%, 60%, 70%, 80%, 90%, 91%, 92%, 93%, 94%, 95%, 96%, 97%, 98% or 99% sequence identity therewith, or a fragment or derivative thereof one or more sequences independently selected from the group consisting of EPcIB-001 to EPcIB-021 of Table B, or a sequence having at least 50%, 60%, 70%, 80%, 90%, 91%, 92%, 93%, 94%, 95%, 96%, 97%, 98% or 99% sequence identity therewith, or a fragment or derivative thereof and/or EPcIC-001 to EPcIC-005 of Table C, or a sequence having at least 50%, 60%, 70%, 80%, 90%, 91%, 92%, 93%, 94%, 95%, 96%, 97%, 98% or 99% sequence identity therewith, or a fragment or derivative thereof;
iv) one or more sequences independently selected from the group consisting of EPcIB-001 to EPcIB-021 of Table B, or a sequence having at least 50%, 60%, 70%, 80%, 90%, 91%, 92%, 93%, 94%, 95%, 96%, 97%, 98% or 99% sequence identity therewith, or a fragment or derivative thereof, in combination one or more sequences independently selected from the group consisting of EPcIC-001 to EPcIC-005 of Table C, or a sequence having at least 50%, 60%, 70%, 80%, 90%, 91%, 92%, 93%, 94%, 95%, 96%, 97%, 98% or 99% sequence identity therewith, or a fragment or derivative thereof; and optionally or a sequence having at least 50%, 60%, 70%, 80%, 90%, 91%, 92%, 93%, 94%, 950/0, 96%, 97%, 98% or 99% sequence identity therewith, or a fragment or derivative thereof one or more sequences independently selected from the group consisting of EPcIA-001 to EPcIA-142 of Table A or a sequence having at least 50%, 60%, 70%, 80%, 90%, 91%, 92%, 93%, 94%, 95%, 96%, 97%, 98% or 99% sequence identity therewith, or a fragment or derivative thereof and/or EPcID-001 of Table D, or a sequence having at least 50%, 60%, 70%, 80%, 90%, 91%, 92%, 93%, 94%, 95%, 96%, 97%, 98% or 99% sequence identity therewith, or a fragment or derivative thereof;
v) one or more sequences independently selected from the group consisting of EPcIC-001 to EPcIC-005 of Table C, or a sequence having at least 50%, 60%, 70%, 80%, 90%, 91%, 92%, 93%, 94%, 95%, 96%, 97%, 98% or 99% sequence identity therewith, or a fragment or derivative thereof, in combination with EPcID-001 of Table D or a sequence having at least 50%, 60%, 70%, 80%, 90%, 91%, 92%, 93%, 94%, 95%, 96%, 97%, 98% or 99% sequence identity therewith, or a fragment or derivative thereof; and optionally in combination with one or more sequences independently selected from the group consisting of EPcIA-001 to EPcIA-142 of Table A, or a sequence having at least 50%, 60%, 70%, 80%, 90%, 91%, 92%, 93%, 94%, 95%, 96%, 97%, 98% or 99% sequence identity therewith, or a fragment or derivative thereof; and/or one or more sequences independently selected from the group consisting of EPcIB-001 to EPcIB-021 of Table B or a sequence having at least 50%, 60%, 70%, 80%, 90%, 91%, 92%, 93%, 94%, 95%, 96%, 97%, 98% or 99% sequence identity therewith, or a fragment or derivative thereof; and
vi) one or more sequences independently selected from the group consisting of EPcIB-001 to EPcIB-021 of Table B or a sequence having at least 50%, 60%, 70%, 80%, 90%, 91%, 92%, 93%, 94%, 95%, 96%, 97%, 98% or 99% sequence identity therewith, or a fragment thereof, in combination with EPcID-001 of Table D or a sequence having at least 50%, 60%, 70%, 80%, 90%, 91%, 92%, 93%, 94%, 95%, 96%, 97%, 98% or 99% sequence identity therewith, or a fragment or derivative thereof; optionally in combination with of EPcIC-001 to EPcIC-005 of Table C, or a sequence having at least 50%, 60%, 70%, 80%, 90%, 91%, 92%, 93%, 94%, 95%, 96%, 97%, 98% or 99% sequence identity therewith, or a fragment or derivative thereof and/or EPcIA-001 to EPcIA-142 of Table A, or a sequence having at least 50%, 60%, 70%, 80%, 90%, 91%, 92%, 93%, 94%, 95%, 96%, 97%, 98% or 99% sequence identity therewith, or a fragment or derivative thereof.

19. A fusion protein according to claim 1, wherein two or more PVTD's are provided, and the combination of PVTD's is selected from:
i) one or more sequences independently selected from the group consisting of PfN-01 to PfN-86 of Table H or a sequence having at least 50%, 60%, 70%, 80%, 90%, 91%, 92%, 93%, 94%, 95%, 96%, 97%, 98% or 99% sequence identity therewith, or a fragment or derivative thereof, in combination one or more sequences independently selected from the group consisting of PCoil-01 to PCoil-46 of Table I, or a sequence having at least 50%, 60%, 70%, 80%, 90%, 91%, 92%, 93%, 94%, 95%, 96%, 97%, 98% or 99% sequence identity therewith, or a fragment or derivative thereof and optionally in combination with one or more sequences independently selected from the group consisting of PfC-01 to PfC-61 of Table J, or a sequence having at least 50%, 60%, 70%, 80%, 90%, 91%, 92%, 93%, 94%, 95%, 96%, 97%, 98% or 99% sequence identity therewith, or a fragment or derivative thereof and/or a Pf2 sequence preferably from one of the Pf2 domains in sequences EPcIB-001 to EPcIB-021 of Table B, or a sequence having at least 50%, 60%, 70%, 80%, 90%, 91%, 92%, 93%, 94%, 95%, 96%, 97%, 98% or 99% sequence identity therewith, or a fragment or derivative thereof;
ii) one or more sequences independently selected from the group consisting of PfN-01 to PfN-86 of Table H or a sequence having at least 50%, 60%, 70%, 80%, 90%, 91%, 92%, 93%, 94%, 95%, 96%, 97%, 98% or 99% sequence identity therewith, or a fragment or derivative thereof, in combination one or more sequences independently selected from the group consisting of PfC-01 to PfC-61 of Table J, or a sequence having at least 50%, 60%, 70%, 80%, 90%, 91%, 92%, 93%, 94%, 95%, 96%, 97%, 98% or 99% sequence identity therewith, or a fragment or derivative thereof and optionally in combination with one or more sequences independently selected from the group consisting of PCoil-01 to PCoil-46 of Table I, or a sequence having at least 50%, 60%, 70%, 80%, 90%, 91%, 92%, 93%, 94%, 95%, 96%, 97%, 98% or 99% sequence identity therewith, or a fragment or derivative thereof and/or a Pf2 sequence, preferably from one of the Pf2 domains in sequences EPcIB-001 to EPcIB-021 of Table B, or a sequence having at least 50%, 60%, 70%, 80%, 90%, 91%, 92%, 93%, 94%, 95%, 96%, 97%, 98% or 99% sequence identity therewith, or a fragment or derivative thereof;
iii) one or more sequences independently selected from the group consisting of PfN-01 to PfN-86 of Table H or a sequence having at least 50%, 60%, 70%, 80%, 90%, 91%, 92%, 93%, 94%, 95%, 96%, 97%, 98% or 99% sequence identity therewith, or a fragment or derivative thereof, in combination with a Pf2 sequence, preferably from one of the Pf2 domains in sequences EPcIB-001 to EPcIB-021 of Table B, or a sequence having at least 50%, 60%, 70%, 80%, 90%, 91%, 92%, 93%, 94%, 95%, 96%, 97%, 98% or 99% sequence identity therewith, or a fragment or derivative thereof, and optionally in combination with one or more sequences independently selected from the group consisting of PfC-01 to PfC-61 of Table J, or a sequence having at least 50%, 60%, 70%, 80%, 90%, 91%, 92%, 93%, 94%, 95%, 96%, 97%, 98% or 99% sequence identity therewith, or a fragment or derivative thereof and/or PCoil-01 to PCoil-46 of Table I, or a sequence having at least 50%, 60%, 70%, 80%, 90%, 91%, 92%, 93%, 94%, 95%, 96%, 97%, 98% or 99% sequence identity therewith, or a fragment or derivative thereof;
iv) one or more sequences independently selected from the group consisting of PCoil-01 to PCoil-46 of Table I, or a sequence having at least 50%, 60%, 70%, 80%, 90%, 91%, 92%, 93%, 94%, 95%, 96%, 97%, 98% or 99% sequence identity therewith, or a fragment or derivative thereof, in combination one or more sequences independently selected from the group consisting of PfC-01 to PfC-61 of Table J, or a sequence having at least 50%, 60%, 70%, 80%, 90%, 91%, 92%, 93%, 94%, 95%, 96%, 97%, 98% or 99% sequence identity therewith, or a fragment or derivative thereof; and optionally in combination with one or more sequences independently selected from the group consisting of PfN-01 to PfN-86 of Table H or a sequence having at least 50%, 60%, 70%, 80%, 90%, 91%, 92%, 93%, 94%, 95%, 96%, 97%, 98% or 99% sequence identity therewith, or a fragment or derivative thereof and/or a Pf2 sequence, preferably from one of the Pf2 domains in sequences EPcIB-001 to EPcIB-021 of Table B, or a sequence having at least 50%, 60%, 70%, 80%, 90%, 91%, 92%, 93%, 94%, 95%, 96%, 97%, 98% or 99% sequence identity therewith, or a fragment or derivative thereof;
v) one or more sequences independently selected from the group consisting of PCoil-01 to PCoil-46 of Table I, or a sequence having at least 50%, 60%, 70%, 80%, 90%, 91%, 92%, 93%, 94%, 95%, 96%, 97%, 98% or 99% sequence identity therewith, or a fragment or derivative thereof, in combination with a Pf2 sequence, preferably from one of the Pf2 domains in sequences EPcIB-001 to EPcIB-021 of Table B, or a sequence having at least 50%, 60%, 70%, 80%, 90%, 91%, 92%, 93%, 94%, 95%, 96%, 97%, 98% or 99% sequence identity therewith, or a fragment or derivative thereof; and optionally in combination with one or more sequences independently selected from the group consisting of PfN-01 to PfN-86 of Table H, or a sequence having at least 50%, 60%, 70%, 80%, 90%, 91%, 92%, 93%, 94%, 95%, 96%, 97%, 98% or 99% sequence identity therewith, or a fragment or derivative thereof; and/or one or more sequences independently selected from the group consisting of PfC-01 to PfC-61 of Table J or a sequence having at least 50%, 60%, 70%, 80%, 90%, 91%, 92%, 93%, 94%, 95%, 96%, 97%, 98% or 99% sequence identity therewith, or a fragment or derivative thereof; and
vi) one or more sequences independently selected from the group consisting of PfC-01 to PfC-61 of Table J, or a sequence having at least 50%, 60%, 70%, 80%, 90%, 91%, 92%, 93%, 94%, 95%, 96%, 97%, 98% or 99% sequence identity therewith, or a fragment or derivative thereof, in combination with a Pf2 sequence, preferably from one of the Pf2 domains in sequences EPcIB-001 to EPcIB-021 of Table B, or a sequence having at least 50%, 60%, 70%, 80%, 90%, 91%, 92%, 93%, 94%, 95%, 96%, 97%, 98% or 99% sequence identity therewith, or a fragment or derivative thereof; and optionally in combination with one or more sequences independently selected from the group consisting of PfN-01 to PfN-86 of Table H, or a sequence having at least 50%, 60%, 70%, 80%, 90%, 91%, 92%, 93%, 94%, 95%, 96%, 97%, 98% or 99% sequence identity therewith, or a fragment or derivative thereof; and/or one or more sequences independently selected from the group consisting of PCoil-01 to PCoil-46 of Table I or a sequence having at least 50%, 60%, 70%, 80%, 90%, 91%, 92%, 93%, 94%, 95%, 96%, 97%, 98% or 99% sequence identity therewith, or a fragment or derivative thereof.

20. A nucleic acid sequence encoding a trimeric fusion protein comprising three polypeptide chains, wherein each polypeptide chain comprises a eukaryotic collagen or collagen-like domain and a PVTD.

21. A nucleic acid sequence encoding a fusion protein, as defined in claim 1.

22. A vector comprising a nucleic acid sequence according to claim 20.

23. A vector according to claim 22, wherein the vector is an expression vector.

24. A host cell comprising a fusion protein according to claim 1.

25. A method of producing a trimeric fusion protein comprising three polypeptide chains, wherein each polypeptide chain comprises a eukaryotic collagen or collagen-like domain and a PVTD, the method comprising:
i) introducing into a host cell one or more nucleic acid sequences encoding a fusion protein or polypeptide of the invention;
ii) culturing the host cell under conditions suitable for expression of said fusion protein or fusion polypeptide and formation of a trimeric fusion protein comprising three of said polypeptide chains; and
iii) optionally isolating the expressed fusion protein from the host cell, preferably wherein the fusion protein is as defined in claim 1.

26. (canceled)

27. A method of producing a fusion protein comprising three polypeptide chains, wherein each polypeptide chain comprises a eukaryotic collagen or collagen-like domain and a PVTD in a cell free system, the method comprising:
i) introducing into a cell-free expression system one or more nucleic acid sequences encoding said fusion protein polypeptide;
ii) maintaining the cell-free expression system under conditions suitable for expression of said fusion protein or fusion polypeptide and formation of a trimeric fusion protein comprising three of said polypeptide chains; and
iii) optionally isolating the expressed fusion protein from the expression system, preferably wherein the fusion protein is as defined in claim 1.

28. A method of producing a fusion polypeptide comprising a eukaryotic collagen or collagen-like domain and a PVTD, the method comprising:
i) introducing into a cell-free expression system a nucleic acid sequence encoding said fusion polypeptide of the invention;
ii) maintaining the cell-free expression system under conditions suitable for expression of said fusion polypeptide; and
iii) optionally isolating the expressed fusion polypeptide from the host cell, preferably wherein the fusion polypeptide is as defined in claim 5.

29. A method of producing a gelatine-like protein, comprising:
i) introducing into a host cell one or more nucleic acid sequences encoding said fusion protein;
ii) culturing the host cell under conditions suitable for expression and formation of a trimeric fusion protein comprising three of said polypeptide chains;
iii) optionally isolating the expressed fusion protein from the host cell, wherein the fusion protein is as defined in claim 1; and
iv) fully or partially denaturing and/or fragmenting the trimeric fusion protein of iii) to produce a gelatine-like protein.

30. A method of producing a gelatine-like protein, in a cell free system, the method comprising:
i) introducing into a cell-free expression system one or more nucleic acid sequences encoding said fusion protein;
ii) maintaining the cell-free expression system under conditions suitable for expression and formation of a trimeric fusion protein comprising three of said polypeptide chains;
iii) optionally isolating the expressed fusion protein from the expression system, wherein the fusion protein is as defined in claim 1, and
iv) fully or partially denaturing and/or fragmenting a trimeric fusion protein of iii) to produce a gelatine-like protein.

31. A method of producing a fusion protein according to claim 25, further comprising purifying the fusion protein.

32. A product comprising a fusion protein as defined in claim 1.

33. A product according to claim 32, selected from the group consisting of a foodstuff, cosmetic, stabilizer, capsules, biomaterial, medical device, medicament, artificial tissue, pharmaceutical or nutritional supplement, chemical or biochemical reagent, or glue.

34. A fusion protein as defined in claim 1, for use in the treatment or prevention of a collagen-related disorder.

35. A method of treatment or prevention of a collagen-related disorder, comprising administrating to a subject a fusion protein as defined in claim 1.

36. Use of a fusion protein as defined in claim 1, in the manufacture of a product.

37. Use according to claim 36, wherein the product is selected from the group consisting of a foodstuff, cosmetic, stabilizer, capsules, biomaterial, medical device, medicament, artificial tissue, pharmaceutical or nutritional supplement, chemical or biochemical reagent, or glue.

38. A fusion polypeptide according to claim 5, wherein the PVTD is derived from a collagen or collagen-like protein.

39. A fusion polypeptide according to claim 5, wherein the PVTD may be provided:
i) within a eukaryotic collagen or collagen-like domain; and/or
ii) flanking one or both ends of a eukaryotic collagen or collagen-like domain; and/or
iii) within non-eukaryotic collagen or collagen-like domain of the fusion polypeptide and/or flanking one or both ends thereof.

40. A fusion polypeptide according to claim 5, wherein the PVTD comprises one or more functional sequences independently selected from the group consisting of stabilization sequences, binding sites, cleavage sites, and linkage sites.

41. A fusion polypeptide according to claim 5, wherein the eukaryotic collagen or collagen-like domain is derived from vertebrate collagen or collagen-like proteins, preferably mammalian, ruminate, fish, or preferably human.

42. A fusion polypeptide according to claim 5 wherein the eukaryotic collagen or collagen-like domain of the fusion protein or polypeptide is composed of two or more heterologous collagen or collagen-like domains operably linked to form a single collagen or collagen-like domain.

43. A fusion polypeptide according to claim 42, wherein more than one eukaryotic collagen or collagen-like domains is present, and wherein one or more or all may be chimeric.

44. A fusion polypeptide according to claim 5, wherein the eukaryotic collagen or collagen-like domain comprises:
i) a human fibrillar collagen chain selected from a1(I), 2(I), a1(II) and a1(III);
ii) a eukaryotic collagen or collagen-like domain comprising a sequence selected from the group consisting of sequences hCol-01 to hCol-89 of Tables K and L;
iii) a sequence consisting of a sequence selected from the groups consisting of the human collagen sequences any of hCol-01 to hCol-49 of Table K and the collagen-like domains of any of hCol-50 to hCol-89 of Table L;
iv) a domain or sequence having at least 50%, 60%, 70%, 80%, 90%, 91%, 92%, 93%, 94%, 95%, 96%, 97%, 98% or 99% sequence identity with a sequence of i), ii) or iii); or
v) fragments, variants or derivatives of a sequence of any of i) to iv).

45. A fusion polypeptide according to claim 5, comprising one or more THDs (triple helical domains), either in tandem or separated by one or more PVTDs or other sequences.

46. A fusion polypeptide according to claim 5, further comprising one or more functional domains, selected from the group consisting of binding sites, cleavage sites, linkage sites, and trimerisation sites.

47. A fusion polypeptide according to claim 5 wherein a eukaryotic collagen or collagen-like domain may be independently selected from the group consisting of vertebrate, mammalian, ruminate, fish, or human collagen or collagen-like proteins.

48. A fusion polypeptide according to claim 5, wherein the PVTD is derived from a bacterial source, preferably gram negative bacteria, preferably pathogenic E. coli, preferably E. coli strain O157:H7.

49. A fusion polypeptide according to claim 5, wherein the PVTD may be:
i) a PVTD of any of EPcIA-001 to EPcIA-142 of Table A, any of EPcIB-001 to EPcIB-021 of Table B, any of EPcIC-001 to EPcIC-005 of Table C, or EPcID-001 of Table D, any of PfN-01 to PfN-86 of Table H, any of PCoil-01 to PCoil-46 of Table I, any of PfC-01 to PfC-61 of Table J, and a Pf2 sequence, preferably one of the Pf2 domains in sequences any of EPcIB-001 to EPcIB-021 of Table B;
ii) having an amino acid sequence having at least 50%, 60%, 70%, 80%, 90%, 91%, 92%, 93%, 94%, 95%, 96%, 97%, 98% or 99% sequence identity with a PVTD of i);
iii) encoded by a nucleic acid selected from the group consisting of sequences of Table E to G and M to R or a nucleic acid sequence having at least 50%, 60%, 70%, 80%, 90%, 91%, 92%, 93%, 94%, 95%, 96%, 97%, 98% or 99% sequence thereto; or
iv) a fragment or derivative of an afore-mentioned sequence which functions as a PVTD

50. A fusion polypeptide according to claim 5, wherein the fusion polypeptide comprises two or more PVTDs, the combination of PVTD's being selected from:
i) one or more sequences independently selected from the group consisting of EPcIA-001 to EPcIA-142 of Table a or a sequence having at least 50%, 60%, 70%, 80%, 90%, 91%, 92%, 93%, 94%, 95%, 96%, 97%, 98% or 99% sequence identity therewith, or a fragment or derivative thereof, in combination one or more sequences independently selected from the group consisting of EPcIB-001 to EPcIB-021 of Table B, or a sequence having at least 50%, 60%, 70%, 80%, 90%, 91%, 92%, 93%, 94%, 95%, 96%, 97%, 98% or 99% sequence identity therewith, or a fragment or derivative thereof; and optionally in combination with one or more sequences independently selected from the group consisting of EPcIC-001 to EPcIC-005 of Table C, or a sequence having at least 50%, 60%, 70%, 80%, 90%, 91%, 92%, 93%, 94%, 95%, 96%, 97%, 98% or 99% sequence identity therewith, or a fragment or derivative thereof and/or EPcID-001 of Table D, or a sequence having at least 50%, 60%, 70%, 80%, 90%, 91%, 92%, 93%, 94%, 95%, 96%, 97%, 98% or 99% sequence identity therewith, or a fragment or derivative thereof;
ii) one or more sequences independently selected from the group consisting of EPcIA-001 to EPcIA-142 of Table A or a sequence having at least 50%, 60%, 70%, 80%, 90%, 91%, 92%, 93%, 94%, 95%, 96%, 97%, 98% or 99% sequence identity therewith, or a fragment or derivative thereof, in combination one or more sequences independently selected from the group consisting of EPcIC-001 to EPcIC-005 of Table C, or a sequence having at least 50%, 60%, 70%, 80%, 90%, 91%, 92%, 93%, 94%, 95%, 96%, 97%, 98% or 99% sequence identity therewith, or a fragment or derivative thereof; and optionally in combination with one or more sequences independently selected from the group consisting of EPcIB-001 to EPcIB-021 of Table B, or a sequence having at least 50%, 60%, 70%, 80%, 90%, 91%, 92%, 93%, 94%, 95%, 96%, 97%, 98% or 99% sequence identity therewith, or a fragment or derivative thereof and/or EPcID-001 of Table D or a sequence having at least 50%, 60%, 70%, 80%, 90%, 91%, 92%, 93%, 94%, 95%, 96%, 97%, 98% or 99% sequence identity therewith, or a fragment or derivative thereof;
iii) one or more sequences independently selected from the group consisting of EPcIA-001 to EPcIA-142 of Table A or a sequence having at least 50%, 60%, 70%, 80%, 90%, 91%, 92%, 93%, 94%, 95%, 96%, 97%, 98% or 99% sequence identity therewith, or a fragment or derivative thereof, in combination and EPcID-001 of Table D, or a sequence having at least 50%, 60%, 70%, 80%, 90%, 91%, 92%, 93%, 94%, 95%, 96%, 97%, 98% or 99% sequence identity therewith, or a fragment or derivative thereof, and optionally or a sequence having at least 50%, 60%, 70%, 80%, 90%, 91%, 92%, 93%, 94%, 95%, 96%, 97%, 98% or 99% sequence identity therewith, or a fragment or derivative thereof one or more sequences independently selected from the group consisting of EPcIB-001 to EPcIB-021 of Table B, or a sequence having at least 50%, 60%, 70%, 80%, 90%, 91%, 92%, 93%, 94%, 95%, 96%, 97%, 98% or 99% sequence identity therewith, or a fragment or derivative thereof and/or EPcIC-001 to EPcIC-005 of Table C, or a sequence having at least 50%, 60%, 70%, 80%, 90%, 91%, 92%, 93%, 94%, 95%, 96%, 97%, 98% or 99% sequence identity therewith, or a fragment or derivative thereof;
iv) one or more sequences independently selected from the group consisting of EPcIB-001 to EPcIB-021 of Table B, or a sequence having at least 50%, 60%, 70%, 80%, 90%, 91%, 92%, 93%, 94%, 95%, 96%, 97%, 98% or 99% sequence identity therewith, or a fragment or derivative thereof, in combination one or more sequences independently selected from the group consisting of EPcIC-001 to EPcIC-005 of Table C, or a sequence having at least 50%, 60%, 70%, 80%, 90%, 91%, 92%, 93%, 94%, 95%, 96%, 97%, 98% or 99% sequence identity therewith, or a fragment or derivative thereof; and optionally or a sequence having at least 50%, 60%, 70%, 80%, 90%, 91%, 92%, 93%, 94%, 950/0, 96%, 97%, 98% or 99% sequence identity therewith, or a fragment or derivative thereof one or more sequences independently selected from the group consisting of EPcIA-001 to EPcIA-142 of Table A or a sequence having at least 50%, 60%, 70%, 80%, 90%, 91%, 92%, 93%, 94%, 95%, 96%, 97%, 98% or 99% sequence identity therewith, or a fragment or derivative thereof and/or EPcID-001 of Table D, or a sequence having at least 50%, 60%, 70%, 80%, 90%, 91%, 92%, 93%, 94%, 95%, 96%, 97%, 98% or 99% sequence identity therewith, or a fragment or derivative thereof;
v) one or more sequences independently selected from the group consisting of EPcIC-001 to EPcIC-005 of Table C, or a sequence having at least 50%, 60%, 70%, 80%, 90%, 91%, 92%, 93%, 94%, 95%, 96%, 97%, 98% or 99% sequence identity therewith, or a fragment or derivative thereof, in combination with EPcID-001 of Table D or a sequence having at least 50%, 60%, 70%, 80%, 90%, 91%, 92%, 93%, 94%, 95%, 96%, 97%, 98% or 99% sequence identity therewith, or a fragment or derivative thereof; and optionally in combination with one or more sequences independently selected from the group consisting of EPcIA-001 to EPcIA-142 of Table A, or a sequence having at least 50%, 60%, 70%, 80%, 90%, 91%, 92%, 93%, 94%, 95%, 96%, 97%, 98% or 99% sequence identity therewith, or a fragment or derivative thereof; and/or one or more sequences independently selected from the group consisting of EPcIB-001 to EPcIB-021 of Table B or a sequence having at least 50%, 60%, 70%, 80%, 90%, 91%, 92%, 93%, 94%, 95%, 96%, 97%, 98% or 99% sequence identity therewith, or a fragment or derivative thereof; and
vi) one or more sequences independently selected from the group consisting of EPcIB-001 to EPcIB-021 of Table B or a sequence having at least 50%, 60%, 70%, 80%, 90%, 91%, 92%, 93%, 94%, 95%, 96%, 97%, 98% or 99% sequence identity therewith, or a fragment thereof, in combination with EPcID-001 of Table D or a sequence having at least 50%, 60%, 70%, 80%, 90%, 91%, 92%, 93%, 94%, 95%, 96%, 97%, 98% or 99% sequence identity therewith, or a fragment or derivative thereof; optionally in combination with of EPcIC-001 to EPcIC-005 of Table C, or a sequence having at least 50%, 60%, 70%, 80%, 90%, 91%, 92%, 93%, 94%, 95%, 96%, 97%, 98% or 99% sequence identity therewith, or a fragment or derivative thereof and/or EPcIA-001 to EPcIA-142 of Table A, or a sequence having at least 50%, 60%, 70%, 80%, 90%, 91%, 92%, 93%, 94%, 95%, 96%, 97%, 98% or 99% sequence identity therewith, or a fragment or derivative thereof.

51. A fusion polypeptide according to claim 5, wherein two or more PVTD's are provided, and the combination of PVTD's is selected from:
i) one or more sequences independently selected from the group consisting of PfN-01 to PfN-86 of Table H or a sequence having at least 50%, 60%, 70%, 80%, 90%, 91%, 92%, 93%, 94%, 95%, 96%, 97%, 98% or 99% sequence identity therewith, or a fragment or derivative thereof, in combination one or more sequences independently selected from the group consisting of PCoil-01 to PCoil-46 of Table I, or a sequence having at least 50%, 60%, 70%, 80%, 90%, 91%, 92%, 93%, 94%, 95%, 96%, 97%, 98% or 99% sequence identity therewith, or a fragment or derivative thereof and optionally in combination with one or more sequences independently selected from the group consisting of PfC-01 to PfC-61 of Table J, or a sequence having at least 50%, 60%, 70%, 80%, 90%, 91%, 92%, 93%, 94%, 95%, 96%, 97%, 98% or 99% sequence identity therewith, or a fragment or derivative thereof and/or a Pf2 sequence preferably from one of the Pf2 domains in sequences EPcIB-001 to EPcIB-021 of Table B, or a sequence having at least 50%, 60%, 70%, 80%, 90%, 91%, 92%, 93%, 94%, 95%, 96%, 97%, 98% or 99% sequence identity therewith, or a fragment or derivative thereof;
ii) one or more sequences independently selected from the group consisting of PfN-01 to PfN-86 of Table H or a sequence having at least 50%, 60%, 70%, 80%, 90%, 91%, 92%, 93%, 94%, 95%, 96%, 97%, 98% or 99% sequence identity therewith, or a fragment or derivative thereof, in combination one or more sequences independently selected from the group consisting of PfC-01 to PfC-61 of Table J, or a sequence having at least 50%, 60%, 70%, 80%, 90%, 91%, 92%, 93%, 94%, 95%, 96%, 97%, 98% or 99% sequence identity therewith, or a fragment or derivative thereof and optionally in combination with one or more sequences independently selected from the group consisting of PCoil-01 to PCoil-46 of Table I, or a sequence having at least 50%, 60%, 70%, 80%, 90%, 91%, 92%, 93%, 94%, 95%, 96%, 97%, 98% or 99% sequence identity therewith, or a fragment or derivative thereof and/or a Pf2 sequence, preferably from one of the Pf2 domains in sequences EPcIB-001 to EPcIB-021 of Table B, or a sequence having at least 50%, 60%, 70%, 80%, 90%, 91%, 92%, 93%, 94%, 95%, 96%, 97%, 98% or 99% sequence identity therewith, or a fragment or derivative thereof;
iii) one or more sequences independently selected from the group consisting of PfN-01 to PfN-86 of Table H or a sequence having at least 50%, 60%, 70%, 80%, 90%, 91%, 92%, 93%, 94%, 95%, 96%, 97%, 98% or 99% sequence identity therewith, or a fragment or derivative thereof, in combination with a Pf2 sequence, preferably from one of the Pf2 domains in sequences EPcIB-001 to EPcIB-021 of Table B, or a sequence having at least 50%, 60%, 70%, 80%, 90%, 91%, 92%, 93%, 94%, 95%, 96%, 97%, 98% or 99% sequence identity therewith, or a fragment or derivative thereof, and optionally in combination with one or more sequences independently selected from the group consisting of PfC-01 to PfC-61 of Table J, or a sequence having at least 50%, 60%, 70%, 80%, 90%, 91%, 92%, 93%, 94%, 95%, 96%, 97%, 98% or 99% sequence identity therewith, or a fragment or derivative thereof and/or PCoil-01 to PCoil-46 of Table I, or a sequence having at least 50%, 60%, 70%, 80%, 90%, 91%, 92%, 93%, 94%, 95%, 96%, 97%, 98% or 99% sequence identity therewith, or a fragment or derivative thereof;
iv) one or more sequences independently selected from the group consisting of PCoil-01 to PCoil-46 of Table I, or a sequence having at least 50%, 60%, 70%, 80%, 90%, 91%, 92%, 93%, 94%, 95%, 96%, 97%, 98% or 99% sequence identity therewith, or a fragment or derivative thereof, in combination one or more sequences independently selected from the group consisting of PfC-01 to PfC-61 of Table J, or a sequence having at least 50%, 60%, 70%, 80%, 90%, 91%, 92%, 93%, 94%, 95%, 96%, 97%, 98% or 99% sequence identity therewith, or a fragment or derivative thereof; and optionally in combination with one or more sequences independently selected from the group consisting of PfN-01 to PfN-86 of Table H or a sequence having at least 50%, 60%, 70%, 80%, 90%, 91%, 92%, 93%, 94%, 95%, 96%, 97%, 98% or 99% sequence identity therewith, or a fragment or derivative thereof and/or a Pf2 sequence, preferably from one of the Pf2 domains in sequences EPcIB-001 to EPcIB-021 of Table B, or a sequence having at least 50%, 60%, 70%, 80%, 90%, 91%, 92%, 93%, 94%, 95%, 96%, 97%, 98% or 99% sequence identity therewith, or a fragment or derivative thereof;
v) one or more sequences independently selected from the group consisting of PCoil-01 to PCoil-46 of Table I, or a sequence having at least 50%, 60%, 70%, 80%, 90%, 91%, 92%, 93%, 94%, 95%, 96%, 97%, 98% or 99% sequence identity therewith, or a fragment or derivative thereof, in combination with a Pf2 sequence, preferably from one of the Pf2 domains in sequences EPcIB-001 to EPcIB-021 of Table B, or a sequence having at least 50%, 60%, 70%, 80%, 90%, 91%, 92%, 93%, 94%, 95%, 96%, 97%, 98% or 99% sequence identity therewith, or a fragment or derivative thereof; and optionally in combination with one or more sequences independently selected from the group consisting of PfN-01 to PfN-86 of Table H, or a sequence having at least 50%, 60%, 70%, 80%, 90%, 91%, 92%, 93%, 94%, 95%, 96%, 97%, 98% or 99% sequence identity therewith, or a fragment or derivative thereof; and/or one or more sequences independently selected from the group consisting of PfC-01 to PfC-61 of Table J or a sequence having at least 50%, 60%, 70%, 80%, 90%, 91%, 92%, 93%, 94%, 95%, 96%, 97%, 98% or 99% sequence identity therewith, or a fragment or derivative thereof; and
vi) one or more sequences independently selected from the group consisting of PfC-01 to PfC-61 of Table J, or a sequence having at least 50%, 60%, 70%, 80%, 90%, 91%, 92%, 93%, 94%, 95%, 96%, 97%, 98% or 99% sequence identity therewith, or a fragment or derivative thereof, in combination with a Pf2 sequence, preferably from one of the Pf2 domains in sequences EPcIB-001 to EPcIB-021 of Table B, or a sequence having at least 50%, 60%, 70%, 80%, 90%, 91%, 92%, 93%, 94%, 95%, 96%, 97%, 98% or 99% sequence identity therewith, or a fragment or derivative thereof; and optionally in combination with one or more sequences independently selected from the group consisting of PfN-01 to PfN-86 of Table H, or a sequence having at least 50%, 60%, 70%, 80%, 90%, 91%, 92%, 93%, 94%, 95%, 96%, 97%, 98% or 99% sequence identity therewith, or a fragment or derivative thereof; and/or one or more sequences independently selected from the group consisting of PCoil-01 to PCoil-46 of Table I or a sequence having at least 50%, 60%, 70%, 80%, 90%, 91%, 92%, 93%, 94%, 95%, 96%, 97%, 98% or 99% sequence identity therewith, or a fragment or derivative thereof.

52. A nucleic acid sequence encoding a fusion polypeptide, as defined in claim 5.

53. A vector comprising a nucleic acid sequence according to claim 52.

54. A vector according to claim 53, wherein the vector is an expression vector.

55. A host cell comprising a fusion polypeptide according to claim 5.

56. A method of producing a fusion polypeptide comprising a eukaryotic collagen or collagen-like domain and a PVTD, the method comprising:
i) introducing into a host cell a nucleic acid sequence encoding said fusion polypeptide of the invention;
ii) culturing the host cell under conditions suitable for expression of said fusion polypeptide; and
iii) optionally isolating the expressed fusion polypeptide from the host cell, preferably wherein the fusion polypeptide is as defined in claim 38.

57. A method of producing a fusion polypeptide comprising a eukaryotic collagen or collagen-like domain and a PVTD, the method comprising:
i) introducing into a cell-free expression system a nucleic acid sequence encoding said fusion polypeptide of the invention;
ii) maintaining the cell-free expression system under conditions suitable for expression of said fusion polypeptide; and
iii) optionally isolating the expressed fusion polypeptide from the host cell, preferably wherein the fusion polypeptide is as defined in claim 5.

58. A method of producing a fusion polypeptide according to claim 56, further comprising purifying the fusion polypeptide.

59. A product comprising a fusion polypeptide as defined in claim 5.

60. A product according to claim 59, selected from the group consisting of a foodstuff, cosmetic, stabilizer, capsules, biomaterial, medical device, medicament, artificial tissue, pharmaceutical or nutritional supplement, chemical or biochemical reagent, or glue.

61. A fusion polypeptide as defined in claim 5, for use in the treatment or prevention of a collagen-related disorder.

62. A method of treatment or prevention of a collagen-related disorder, comprising administrating to a subject a fusion polypeptide as defined in claim 5.

63. Use of a fusion polypeptide as defined in claim 5, in the manufacture of a product.

64. Use according to claim 63, wherein the product is selected from the group consisting of a foodstuff, cosmetic, stabilizer, capsules, biomaterial, medical device, medicament, artificial tissue, pharmaceutical or nutritional supplement, chemical or biochemical reagent, or glue.
